(19) United States
(12) Patent Application Publication
(10) Pub. No.: US 2019/0351031 A1
(43) Pub. Date: Nov. 21, 2019

(54) METHODS OF SELECTING SUBJECTS FOR COMBINATION CANCER THERAPY WITH A POLYMER-CONJUGATED SOLUBLE PH20

(71) Applicants: HALOZYME, INC., San Diego, CA (US); NORDIC BIOSCIENCE A/S, Herlev (DK)

(72) Inventors: Song Wang, Dublin, CA (US); Darin M. Taverna, Phoenix, AZ (US); Carl Di Casoli, Sudbury, MA (US); Nicholas Willumsen, Dyssegard (DK); Morten Karsdal, Kobenhavn (DK); Thomas Mueller, San Francisco, CA (US)

(21) Appl. No.: 16/413,559

(22) Filed: May 15, 2019

Related U.S. Application Data
(60) Provisional application No. 62/672,554, filed on May 16, 2018.

(51) Int. Cl. A61K 38/47; A61P 35/00; A61K 9/127; A61K 47/60; G01N 33/574; G01N 33/68; A61K 31/337; A61K 31/7068; A61K 38/57

(52) U.S. Cl. CPC A61K 38/47; A61P 35/00; A61K 9/127; C12Y 302/01035; A61K 38/57; G01N 33/574; G01N 33/68; A61K 31/337; A61K 31/7068; A61K 47/60

(57) ABSTRACT

Provided herein are methods of selecting subjects having cancer for combination therapy that includes administering an anti-hyaluronan agent, such as a polymer-conjugated hyaluronan-degrading enzyme. Combination therapies can include, in addition to the anti-hyaluronan agent, a tumor-targeted taxane and, optionally, a chemotherapeutic agent such as a nucleoside analog. Combinations for performing the methods are provided, as are uses of the combinations for selecting subjects for treatment. The combination therapy can be used in methods of treating cancers, and in particular solid tumor cancers.

### RELATED APPLICATIONS

[0001] Benefit of priority is claimed to U.S. provisional application Ser. No. 62/672,554, entitled “METHODS OF SELECTING SUBJECTS FOR COMBINATION CANCER THERAPY WITH A POLYMER-CONJUGATED SOLUBLE PH20,” filed May 16, 2018, to Applicants Halozyme, Inc. and Nordic Bioscience A/S, and inventors Song Wang, Darin M. Taverna, Carl Di Casoli, Nicholas Willumsen, Morten Karsdal, and Thomas Mueller.

[0002] This application is related to International Patent Application No. PCT/US2019/032537, entitled “METHODS OF SELECTING SUBJECTS FOR COMBINATION CANCER THERAPY WITH A POLYMER-CONJUGATED SOLUBLE PH20,” filed the same day herewith, to Applicants Halozyme, Inc. and Nordic Bioscience A/S, and inventors Song Wang, Darin M. Taverna, Carl Di Casoli, Nicholas Willumsen, Morten Karsdal, and Thomas Mueller.

[0003] This application is related to U.S. patent application Ser. No. 13/815,804, entitled “COMBINATION THERAPY WITH AN ANTI-HYALURONAN AGENT AND THERAPEUTIC AGENT,” filed Mar. 15, 2013, now issued as U.S. Pat. No. 9,913,822, on Mar. 13, 2018, to Daniel C. Maneval, H. Michael Shepard and Curtis B. Thompson.

[0004] The subject matter of each of these applications and patents is incorporated by reference in its entirety. Also incorporated by reference are U.S. Pat. Nos. 9,206,464, 9,606,130 and 9,726,674, which describe exemplary antibodies that can be used in methods provided herein.

### INCORPORATION BY REFERENCE OF SEQUENCE LISTING PROVIDED ELECTRONICALLY

[0005] An electronic version of the Sequence Listing is filed herewith, the contents of which are incorporated by reference in their entirety. The electronic file was created on May 14, 2019, is 994 kilobytes in size, and is titled 3129SEQ001.txt. A substitute Sequence Listing is filed electronically herewith, the contents of which are incorporated by reference in their entirety. The electronic file was created on Jul. 22, 2019, is 994 kilobytes in size, and is titled 3129SEQ002.txt.

### FIELD OF THE INVENTION

[0006] Provided herein are methods of selecting subjects having cancer for combination therapy that includes administering an anti-hyaluronan agent, such as a polymer-conjugated hyaluronidase.

### BACKGROUND

[0007] Anti-hyaluronan agents, such as hyaluronan-degrading enzymes, for example, soluble forms of human PH20, are used in methods of treating hyaluronan-associated diseases or conditions, including certain cancers. Cancers, such as pancreatic cancers and other cancers whose tumors have a stromal barrier, are generally intractable to treatment and have poor outcomes. For example, subjects diagnosed with pancreatic cancer have a life expectancy of less than a year after diagnosis. Soluble forms of human PH20 are used in combination therapy with other anti-tumor agents for treatment of these types of cancers. These treatments, however, do not improve outcomes in all subjects.

[0008] In view of the poor prognoses of the cancers, it is useful to be able to select a treatment that will be effective to avoid wasting the limited time for survival on an ineffective treatment. Tumor shrinkage or metastasis as a measure of effectiveness of treatment can require months to assess and, thus, is impractical for subjects whose life expectancy is measured in months. Therefore, it is important to develop methods for identifying subjects in whom treatment is likely to be effective or is beneficial. It is among the objects herein to provide such methods for identifying subjects for treatment that includes a soluble hyaluronidase and for treating the identified subjects.

### SUMMARY

[0009] Provided are methods for identifying and/or selecting subjects diagnosed with cancer for whom combination therapy that includes an anti-hyaluronan agent, for example a hyaluronidase, such as a polymer-conjugated soluble hyaluronidase or a liposome, or other lipid-based delivery vehicle, comprising a soluble hyaluronidase, is likely to be beneficial. The benefit can be assessed as a survival outcome, such as one or more of increased progression free survival (PFS), overall response rate (ORR) and overall survival (OS). Also provided are methods of treatment. Also provided are methods for assessing the effectiveness of such treatment, once treatment commences.

[0010] The methods for selecting patients and/or assessing outcome detect particular biomarkers, levels thereof and ratios thereof, which are representative of imbalances in turnover/organization of the extracellular matrix (ECM), which are predictive or indicative of subjects for whom treatment that includes a soluble hyaluronidase will be or is beneficial, and are present in body fluids such as blood, plasma, serum, cerebral spinal fluid, and urine. Based on such levels and ratios, beneficial outcomes of treatments can be assessed and/or predicted. In some examples, subjects selected for combination therapy that includes a soluble hyaluronidase have about or at least a threshold ratio of the level of a degradation product of Type III collagen to the level of a product correlated to formation of Type III collagen. In some examples, the degradation product of Type III collagen is a biomarker designated C3M. In some examples, the propeptide biomarker correlated to formation of Type III collagen is a biomarker designated Pro-C3. The threshold ratio can be at least or about or at least about or at least 0.25, 0.3, 0.35, 0.4, 0.45, 0.5, 0.55, 0.6, 0.65, 0.7, 0.75, 0.8, 0.85 or 0.9, or between at or about 0.5 to at or about 0.6, 0.65, 0.7, 0.75 or 0.8 or between at or about 0.25 or at or about 0.3 to at or about 0.5, 0.55, 0.6, 0.65, 0.7, 0.75, 0.8, 0.85 or 0.9 or between about 0.7 to about 0.75, 0.8, 0.85 or 0.9. Any method for measuring the amount or level of each of these biomarkers in a sample can be employed. The ratios herein represent the ratio of the amounts or levels of the biomarkers. Other ratios or measurements of the relative or absolute levels of these biomarkers can be used and an appropriate threshold determined; the skilled person can determine other such relationships and thresholds.

[0011] Subjects selected for treatment are then administered the therapy that includes a soluble hyaluronidase, such as a polymer-conjugated soluble hyaluronidase or a liposome comprising a soluble hyaluronidase, and, typically another anti-cancer agent, such as a tumor-targeted taxane. Additional agents can be included in the therapy, including nucleoside analogs, other chemotherapeutic agents, and/or immunotherapeutic agents/treatments. The treatment with the hyaluronidase can be combined with any appropriate anti-cancer therapeutic or treatment for the particular cancer; selection of the additional anti-cancer therapeutic or treatment depends on the type of cancer. Once treatment commences, the method of selecting subjects can be repeated to assess the levels of the biomarkers and changes thereof.

[0012] Provided are methods for selecting a subject having cancer who will benefit from treatment with combination therapy. The combination therapy is one that includes administration of a soluble hyaluronidase modified or in a form that has increased serum-half-life, such as a polymer-conjugated soluble hyaluronidase or a liposome or other lipid-based vehicle or multi-lamellar vesicle comprising the soluble hyaluronidase. The soluble hyaluronidase can be a human hyaluronidase, such as a soluble form of human PH20. For the treatment, the soluble hyaluronidase is either modified, such as modified with a polymer to increase serum half-life or resistance to an endogenous protease, or associated with a lipid-based vehicle. The method includes the steps of:

[0013] a) measuring the amount of expression or level of a first biomarker associated with Type III collagen degradation in a sample from the subject;

[0014] b) measuring the amount of expression or level of a second biomarker associated with Type III collagen formation in a sample from the subject;

[0015] c) determining the ratio of the amount of expression or level of the first biomarker/second biomarker; and

[0016] d) selecting a subject for treatment for whom the ratio is indicative of benefit from administration of the combination therapy with a soluble hyaluronidase, wherein benefit is one or more of increased progression-free survival (PFS), objective/overall response rate (ORR), and/or overall survival (OS) when treated with the combination therapy compared to treatment with the same therapy, but without the soluble hyaluronidase. Steps a) and b) can be performed in any order or at the same time, or together (duplexed) where the amount of each biomarker is detected, such as with differentially labeled antibodies or captured separately for detection. The methods herein for selecting subjects for treatment, can be used for identifying subjects who will benefit from a treatment or combination therapy that includes a hyaluronidase.

[0017] Also provided are methods for treating such subjects by selecting subjects for treatment as described above, and then administering a combination therapy that includes a soluble hyaluronidase such as a polymer-conjugated soluble hyaluronidase or liposome associated soluble hyaluronidase, such as a soluble form of human PH20. The methods of treatment include steps of:

[0018] a) measuring the amount of expression or level of a first biomarker associated with Type III collagen degradation in a sample from the subject;

[0019] b) measuring the amount of expression or level of a second biomarker associated with Type III collagen formation in a sample from the subject;

[0020] c) determining the ratio of the amount of expression or level of the first biomarker/second biomarker;

[0021] d) selecting a subject for treatment for whom the ratio is indicative of benefit from administration of the combination therapy with a soluble hyaluronidase that is a polymer-conjugated soluble hyaluronidase or a liposome comprising a soluble hyaluronidase, wherein benefit is one or more of increased progression-free survival (PFS), objective/overall response rate, and/or overall survival (OS) when treated with the combination therapy compared to treatment with the same therapy, but without the soluble hyaluronidase; and

[0022] e) administering the combination therapy that comprises the soluble hyaluronidase to the selected subject.

[0023] The benefit of treatment with the soluble hyaluronidase can be one or more of increased PFS of at least 1 month, increased ORR of at least 10% and increased OS of at least 7 months. A ratio of the biomarkers indicative of benefit can be selected based on the percentage of subjects treated who, based on statistical evaluation, will benefit, such as at least 50% or at least 75% of the subjects treated will have one or more of a longer PFS, ORR, or OS compared to treatment without the soluble hyaluronidase. Such cutoff selection is within the skill of the skilled physician, and can include evaluation of the type of tumor and extent of the benefit. Ratios between the biomarkers can be at least 0.25, 0.3, 0.35, 0.4, 0.45, 0.5, 0.55, 0.6, 0.65, 0.7, 0.75, 0.8, 0.85 or 0.9 or ≥0.25, ≥0.3, ≥0.35, ≥0.4, ≥0.45, ≥0.5, ≥0.54, ≥0.55, ≥0.6, ≥0.65, ≥0.7, ≥0.75, ≥0.8, or ≥0.85.

[0024] In accord with the methods, the biomarker associated with type III collagen degradation can be, for example, a neo-epitopic fragment of type III collagen produced from the degradation of collagen type III but not produced in the formation of collagen type III. In accord with the methods, the biomarker associated with type III collagen formation can be, for example, a neo-epitopic fragment of type III collagen produced in the formation of collagen type III but not produced from the degradation of collagen type III.

[0025] In exemplary methods, the biomarker is a matrix metalloproteinase (MMP) degradation product of Type III collagen that contains a neo-epitope, such as a degradation product of MMP-2 or MMP-9. In these methods or other methods, the biomarker associated with Type III collagen degradation is designated C3M, where C3M is an MMP-mediated degradation product of Type III collagen that comprises a neo-epitope. C3M is produced upon cleavage of type III collagen at a position corresponding to position 610 of human type III collagen (SEQ ID NO:227). In particular examples, C3M comprises residues corresponding to 610-619 of human type III collagen (SEQ ID NO:227), and can consist of residues corresponding to 610-619 of human type III collagen (SEQ ID NO: 227). Exemplary of the neo-epitope for this biomarker is KNGETGPQGP (SEQ ID NO:226). This is the unique epitope against which antibodies or other specific binding partner can be generated.

[0026] In accord with the methods, a biomarker associated with type III collagen formation contains or is the neo-epitope of released N-terminal pro-peptide of type III collagen (PIIINP), such as the biomarker designated Pro-C3. Pro-C3 is an N-terminal propeptide of type III collagen (PIIINP) that comprises the neo-epitope. In particular embodiments, Pro-C3 comprises the residues corresponding to the C-terminal amino acid sequence CPTGPQNYSP (SEQ ID NO:216) in human type III collagen, which neo-epitope is formed by the N-protease cleavage of human type III collagen (SEQ ID NO:227) from intact procollagen type III at the Pro-Gln bond between amino acids P153-Q154 in human type III collagen. In these embodiments, Pro-C3 comprises the sequence CPTGPQNYSP (SEQ ID NO:216; amino acid residues 144-153 of SEQ ID NO:227) and contains the neo-epitope, such as the sequence of amino acids that consists of PTGPQNYSP (SEQ ID NO:229; amino acid residues 145-153 of SEQ ID NO:227).

[0027] Provided herein are methods for treating a cancer. In accord with methods provided herein, subjects for treatment are selected by assessing the biomarkers as described above, and subjects whose levels of the markers (ratio) is at or above the threshold are treated.

[0028] For treatment, a composition containing a soluble hyaluronidase agent is administered to a subject selected as having about or at least a threshold ratio of the level of a degradation product of Type III collagen to the level of a product correlated to formation of Type III collagen. In some examples, the degradation product of Type III collagen is C3M. In some examples, the propeptide biomarker for formation of Type III collagen is Pro-C3. Each comprise a neo-epitope; detection thereof determines the amount or level of each product in a sample. The threshold ratio can be about, or at least about or at least 0.5, 0.55, 0.6, 0.65, 0.7, 0.75, 0.8, 0.85 or 0.9, or between about or at 0.5 to about or at 0.6, 0.65, 0.7, 0.75 or 0.8 or between about or at 0.6 to about or at 0.7, 0.75, 0.8, 0.85 or 0.9 or between about 0.7 to about 0.75, 0.8, 0.85 or 0.9. In some examples, the threshold ratio can be about or at least 0.25, 0.3, 0.35, 0.4, 0.45, 0.5, 0.55, 0.6, 0.65, 0.7, 0.75, 0.8, 0.85 or 0.9, or between at or about 0.5 to at or about 0.6, 0.65, 0.7, 0.75 or 0.8 or between at or about 0.25 or at or about 0.3 to at or about 0.5, 0.55, 0.6, 0.65, 0.7, 0.75, 0.8, 0.85 or 0.9 or between about 0.7 and about 0.75, 0.8, 0.85 or 0.9. The higher the threshold the greater the percentage of patients selected for treatment who will benefit, but also the higher the ratio the more subjects who would have benefited are not selected from treatment. Hence, as described herein, these factors are considered in selecting a threshold ratio.

[0029] The methods further can include administration, in addition to the soluble hyaluronidase, of a composition containing an anti-tumor agent. For example, the methods can include administration of a tumor-targeted taxane. In some examples, the methods further include administration of a composition containing another anti-cancer agent, such as a nucleoside analog. In some examples, the methods further include administration of a corticosteroid. In yet other examples, the methods further include administration of a cancer treatment, such as a checkpoint inhibitor. In such combinations and methods, the agents are provided in therapeutically effective amounts as described herein.

[0030] In the methods of selection and treatment, each biomarker can be detected by any suitable methods, including, but not limited to, assays, comprising binding partners that specifically bind to the neo-epitope in each biomarker, and not to the full-length polypeptide, and other assays for detecting and quantitating molecules, such as mass spectrometry. These include immunoassays. The methods for selecting and the methods for treating can include an immunoassay comprising an antibody that specifically binds to the fragment comprising the neo-epitope but not the full-length or longer fragment that does not comprise the neo-epitope. Each biomarker can be quantitated by such immunoassay, and a ratio determined. It also is possible to measure each and determine relative amounts that reflect the ratio. As described in herein, by knowing the sequence of the fragment comprising the neo-epitope, one of skill in the art readily can produce binding partners for detection of the biomarker in a sample. Exemplary antibodies and methods for producing them are known in the art, and also are described herein.

[0031] For example, the antibody to assess collagen formation specifically binds to CPTGPQNYSP (SEQ ID NO:216), and does not bind to or binds with lower affinity to the elongated version of the C-terminal amino acid sequence CPTGPQNYSPQZ (SEQ ID NO:228), where:

[0032] Z is absent or is one or more contiguous amino acids, following SPQ, of collagen type III; and

[0033] the affinity of the antibody for CPTGPQNYSP (SEQ ID NO:216) to the affinity of the antibody for a peptide consisting of the amino acid sequence CPTGPQNYSPQZ-COOH (SEQ ID NO:228) is at least 10 to 1 or at least 50 to 1 or at least 100 to 1.

[0034] For example, the antibody to assess collagen degradation specifically binds to KNGETGPQGP (SEQ ID NO:226), and does not bind to or binds with lower affinity to the full length collagen type III (SEQ ID NO:227), wherein the affinity of the antibody for KNGETGPQGP (SEQ ID NO:226) compared to the affinity of the antibody for the full length collagen type III polypeptide is at least 10 to 1 or at least 50 to 1 or at least 100 to 1. In other examples, the antibody to assess collagen degradation specifically binds to KNGETGPQGP (SEQ ID NO:226), and does not bind to or binds with lower affinity to the elongated peptide PGKNGETGPQGP (SEQ ID NO:230), wherein the affinity of the antibody for KNGETGPQGP (SEQ ID NO:226) compared to the affinity of the antibody for the elongated polypeptide is at least 10 to 1 or at least 50 to 1 or at least 100 to 1. The antibodies can be monoclonal antibodies or an antigen-binding fragment of an antibody, such as a fab, or single chain antibody or any other such binding fragment. Exemplary antibodies include the antibody that binds to Pro-C3 designated NB61N-62, and the antibody that binds to C3M designated CO3-610C (see, e.g., U.S. Pat. Nos. 9,206,464, 9,606,130 and 9,726,674, which describe each antibody).

[0035] In embodiments herein, the ratio is determined by measuring the amount of biomarker C3M by detecting binding between an antibody and peptide fragments in the body fluid sample, wherein the antibody specifically binds to a neo-epitope amino acid sequence comprising KNGETGPQGP (SEQ ID NO:226); measuring the amount of biomarker Pro-C3 by detecting binding between an antibody and peptide fragments in the body fluid sample, wherein the antibody specifically binds to a neo-epitope amino acid sequence comprising CPTGPQNYSP (SEQ ID NO:216); and determining the ratio of the amounts of biomarker C3M and Pro-C3.

[0036] In embodiments herein, the second biomarker Pro-C3 is detected by binding to a monoclonal antibody or antigen binding fragment thereof that is specifically reactive with the neo-epitope C-terminal sequence CPTGPQNYSP-COOH (SEQ ID NO:216) in human PIIINP or the neo-epitope C-terminal sequence CPTGGQNYSP-COOH (SEQ ID NO:244) in rodent PIIINP, which is formed by the N-protease cleavage of PIIINP from intact procollagen type III at the Pro-Gln bond between amino acids P153-Q154 in human PIIINP. The affinity of the antibody for amino acid sequence CPTGXQNYSP-COOH (SEQ ID NO:214; X is P in human PIIINP and G in rodent PIIINP) to the affinity of the antibody for elongated amino acid sequence CPTGXQNYSPQZ-COOH (SEQ ID NO:215) can be at least 10 to 1 and/or the antibody does not recognize or binds with lower affinity to a shortened version of a C-terminal peptide of PIIINP; the shortened peptide consists of the sequence of amino acids CPTGXQNYS (SEQ ID NO:218); and the ratio of the affinity of the antibody for amino acid sequence CPTGXQNYSP-COOH (SEQ ID NO:214) to the affinity of said antibody for shortened amino acid sequence CPTGXQNYS-COOH (SEQ ID NO:218) is at least 10 to 1.

[0037] In particular methods of selection and treatment, the cancer therapy can be a combination therapy in which the soluble hyaluronidase, such as a polymer-conjugated soluble hyaluronidase, is administered in combination with a tumor-targeted taxane. For selecting subjects, the biomarker associated with Type III collagen degradation is C3M; the biomarker associated with Type III collagen formation is PRO-C3; and the ratio is ≥0.5 or is at least 0.5 or 0.544. In some embodiments, the ratio is ≥0.3 or 0.38, ≥0.45, ≥0.5, ≥0.55, ≥0.6, ≥0.65, ≥0.7, ≥0.75, ≥0.8 or ≥0.85. The tumor-targeted taxane can be nab-paclitaxel or nab-docetaxel.

[0038] In other embodiments of the methods of selection and methods of treatment, the combination therapy comprises administration of a polymer-conjugated soluble hyaluronidase and chemotherapeutic agent or immunotherapeutic agent or other anti-cancer therapeutic, such as a cellular therapy or oncolytic virus therapy; the first biomarker associated with Type III collagen degradation is C3M; the second biomarker associated with Type III collagen formation is Pro-C3; and the ratio is at least ≥0.3, ≥0.35, ≥0.4, ≥0.45, ≥0.5, or is at least 0.5 or 0.544. In accord with these methods for selecting a subject for treatment and/or treating a subject, the chemotherapeutic agent or immunotherapeutic agent or other agent for treatment is any described herein above and below, and any known to those of skill in the art. These include the nucleoside analogs. It is understood that the treatment with a soluble hyaluronidase, which is in a form that has increased serum half-life, such as a polymer-conjugated soluble hyaluronidase or one associated with a liposome or other such vehicle, can be combined and is combined with known cancer therapies. Particular protocols or regimens and agents are used for different cancers. The protocols or regimens can be modified to include a soluble hyaluronidase, as provided herein. The methods of selection of subjects likely to benefit can be combined with such protocols and methods.

[0039] In practicing the methods, any appropriate sample can be used, particularly a body fluid. Body fluids include, but are not limited to, blood, urine, cerebrospinal fluid, saliva, synovial fluid, peritoneal fluid, pericardial fluid, serum, plasma, pleural fluid, amniotic fluid, vitreous humor, and aqueous humor. Exemplary of such fluids is serum or plasma or urine or amniotic fluid.

[0040] Each or both of the biomarkers can be detected by an immunoassay, such as radioimmunoassay or an enzyme-linked immunosorbent assay (ELISA). The assay can be a competition assay or a sandwich assay.

[0041] The cancers treated include solid tumors and hematologic malignancies. The cancers include those in which the tumors have increased cellular and/or stromal expression of a hyaluronan, compared to a non-cancerous tissue of the same tissue type or compared to a non-metastatic tumor of the same tumor-type. The cancer can be one or more of a late-stage cancer, a metastatic cancer, and an undifferentiated cancer. Exemplary cancers include, ovarian cancer, in situ carcinoma (ISC), squamous cell carcinoma (SCC), prostate cancer, pancreatic cancer, small cell lung cancer, non-small cell lung cancer (NSCLC), mesothelioma, breast cancer, brain cancer, head and neck cancer, cervical cancer, colon cancer, uterine cancer, testicular cancer, bladder cancer, stomach cancer, hepatoma, melanoma, glioma, retinoblastoma, myeloma, lymphoma, and leukemia. In particular, the methods herein are for selection of subjects for treatment and for treatment of pancreatic cancer, such as pancreatic ductal adenocarcinoma (PDAC), and including metastatic pancreatic cancer, such as metastatic pancreatic ductal adenocarcinoma (PDAC).

[0042] The soluble hyaluronidase can be in any form that renders the serum half-life sufficient for treatment, particularly parenteral administration. These forms include providing liposomes that include the soluble hyaluronidase and polymer-conjugated soluble hyaluronidase. Polymers and modifiers include, but are not limited to, dextran, sialation, albumin, PEGylation, and fusion to a polypeptide that increases resistance to an endogenous protease or increases serum half-life of the hyaluronidase. For example if the soluble hyaluronidase, such as a soluble PH20, is PEGylated, it can have, on average, 1 or 2-6, such as 3-5, PEG moieties per hyaluronidase molecule. Exemplary of polypeptides are albumin and linkage to to alpha-1 antitrypsin and variants thereof (see, e.g., SEQ ID NOs: 273-277; see also U.S. Pat. No. 9,012,606).

[0043] The soluble hyaluronidase can be a soluble PH20 and can be selected from among, but not limited to, an ovine, mouse, monkey, bovine, bacterial and human PH20, particularly a soluble human PH20. Exemplary thereof is a soluble hyaluronidase selected from among:

[0044] a) a polypeptide that is encoded by a nucleic acid molecule encoding a C-terminally truncated polypeptide of the polypeptide set forth in SEQ ID NO:1, where the C-terminal amino acid residue is selected from among 467 to 495 of SEQ ID NO:1 or 474 to 483 of SEQ ID NO:1; b) a polypeptide that has at least about 91% amino acid sequence identity with a sequence of amino acids set forth in a), whereby the soluble hyaluronidase is soluble, N-glycosylated and neutral active; and c) a soluble PH20 hyaluronidase that has at least 98% sequence identity with residues 36-483 of SEQ ID NO:1. This includes a soluble hyaluronidase that has the sequence of amino acids set forth as amino acids 36-467, 36-468, 36-469, 36-470, 36-471, 36-472, 36-473, 36-474, 36-475, 36-476, 36-477, 36-478, 36-479, 36-480, 36-481, 36-482, or 36-483 of SEQ ID NO:1, or has at least about or at 91%, or 95% or 98%, amino acid sequence identity with a sequence of amino acids set forth as amino acids 36-467, 36-468, 36-469, 36-470, 36-471, 36-472, 36-473, 36-474, 36-475, 36-476, 36-477, 36-478, 36-479, 36-480, 36-481, 36-482, or 36-483 of SEQ ID NO:1, such as a soluble hyaluronidase selected from among polypeptides containing a sequence of amino acids set forth in any of SEQ ID NOs: 4-9 and 46-48, and variants thereof that exhibit at least 91%, 95% and 98% sequence identity to any of SEQ ID NOs: 4-9 and 46-48.

[0045] The soluble hyaluronidase can be a polymer-conjugated soluble hyaluronidase, such as a soluble hyaluronidase that comprises a PEGylation moiety (PEG). PEG moieties include those that result from reaction with a PEG reagent selected from among methoxy-poly(ethylene glycol)-succinimidyl butanoate (mPEG-SBA) (5 kDa); methoxy-poly(ethylene glycol)-succinimidyl butanoate (mPEG-SBA) (20 kDa); methoxy-poly(ethylene glycol)-succinimidyl butanoate (mPEG-SBA) (30 kDa); methoxy-poly(ethylene glycol)-succinimidyl α-methylbutanoate (mPEG-SMB) (20 kDa); methoxy-poly(ethylene glycol)-succinimidyl α-methylbutanoate (mPEG-SMB) (30 kDa); methoxy-poly(ethylene glycol)-butyraldehyde (mPEG-butyraldehyde) (30 kDa), methoxy-poly(ethylene glycol)-succinimidyl propionate (mPEG-SPA) (20 kDa); methoxy-poly(ethylene glycol)-succinimidyl propionate (mPEG-SPA) (30 kDa); (methoxy-poly(ethylene glycol)) 2-N-hydroxysuccinimide ester (mPEG2-NHS) (10 kDa branched); (methoxy-poly(ethylene glycol)) 2-N-hydroxysuccinimide ester (mPEG2-NHS) (20 kDa branched); (methoxy-poly(ethylene glycol)) 2-N-hydroxysuccinimide ester (mPEG2-NHS) (40 kDa branched); (methoxy-poly(ethylene glycol)) 2-N-hydroxysuccinimide ester (mPEG2-NHS) (60 kDa branched); biotin-poly(ethylene glycol)-N-hydroxysuccinimide ester (biotin-PEG-NHS) (5 kDa biotinylated); poly(ethylene glycol)-p-nitrophenyl carbonate (PEG-p-nitrophenyl-carbonate) (30 kDa); and poly(ethylene glycol)-propionaldehyde (PEG-propionaldehyde) (30 kDa). The PEG can be a branched or linear PEG, such as a methoxy-PEG (mPEG) and N-hydroxysuccinimidyl ester of methoxy poly(ethylene glycol) butanoic acid. The PEG can have a weight of 30 or about 30 kilodaltons or at least 10, 20, 40, 50, 60, 70, 80, 90, or 100 kilodaltons (kD). The hyaluronidase can be PEGylated such that it only has 2-6, such as 3-5, or about 2-6 or about 3-5, PEG moieties on the average per hyaluronidase molecule.

[0046] In practicing the methods, the soluble hyaluronidase can be administered parenterally. It can be administered intravenously, subcutaneously, transdermally, intraperitoneally, or intra-tumorally. Dosages are any suitable amount selected by the skilled physician, such as a dosage of at or about 10 to 50,000,000 Units, 10 to 40,000,000 Units, 10 to 36,000,000 Units, 10 to 12,000,000 Units, 10 to 1,200,000 Units, 10 to 1,000,000 Units, 10 to 500,000 Units, 100 to 100,000 Units, 500 to 50,000 Units, 1000 to 10,000 Units, 5000 to 7500 Units, 5000 Units to 50,000 Units, or 1,000 to 10,000 Units. Dosage ranges include, but are not limited to, an amount of between or about between 0.01 μg/kg to 15 μg/kg; or the hyaluronidase is administered in a dosage range amount of between or about between 10 to 10,000 Units/kg of the subject.

[0047] The anti-tumor therapy that includes administration of a soluble hyaluronidase, such as a polymer-conjugated soluble hyaluronidase, can be combination therapy that further includes administration of a chemotherapeutic agent, such as a tumor-targeted taxane. Exemplary tumor-targeted taxanes, include, but are not limited to, albuminated taxanes, such as nab-paclitaxel and nab-docetaxel. For effecting therapy, the chemotherapeutic agent can be administered with the soluble hyaluronidase, before the soluble hyaluronidase, after soluble hyaluronidase or intermittently with the soluble hyaluronidase. They can be administered in a single composition, or in separate compositions. The tumor-targeted taxane can be linked directly or indirectly to a tumor targeting moiety. Tumor targeting moieties include, but are not limited to, proteins, such as albumin, and antibodies or antigen-binding fragments thereof. Tumor targeting moieties include, for example, a macromolecule, a protein, a peptide, a monoclonal antibody and a fatty acid lipid. For example, the tumor targeting moiety is a monoclonal antibody selected from Cetuximab or Trastuzumab or an antigen binding fragment thereof, or albumin. The tumor-targeted taxane can be formulated as a delivery vehicle selected from among a micelle, nanoparticle, microsphere, liposome or hydrogel; and the delivery vehicle is linked directly or indirectly to a tumor targeting moiety.

[0048] Taxanes include, but are not limited to, paclitaxel or docetaxel or an analog, derivative or prodrug thereof. Tumor-targeted taxanes, include, but are not limited to, nab-paclitaxel or nab-docetaxel. The tumor-targeted taxane can be administered in a dosage range that is between or about between 1 mg/m2 to 1000 mg/m2 body surface area of the subject.

[0049] The combination therapy for the methods can further include administration of a nucleoside analog. Nucleoside analogs include, but are not limited to, purine or pyrimidine analogs and derivatives thereof. Nucleoside analogs include any known to those of skill in the art for use for cancer therapy, which include, but are not limited to fluoropyrimidine 5-fluorouracil, 5-fluoro-2′-deoxycytidine, cytarabine, gemcitabine, troxacitabine, decitabine, Azacytidine, pseudoisocytidine, Zebularine, Ancitabine, Fazarabine, 6-azacytidine, capecitabine, N4-octadecyl-cytarabine, elaidic acid cytarabine, fludarabine, cladribine, clofarabine, nelarabine, forodesine, and pentostatin, or derivatives thereof. Dosages can be determined by the skilled person, and include a dosage range that is between or between about 100 mg/m2 to 2500 mg/m2. Administration can be effected by any appropriate route. One or all of the components of the combination therapy, for example, is/are administered orally, intravenously (IV), subcutaneously, intramuscularly, intra-tumorally, intradermally, topically, transdermally, rectally, intrathecally or sub-epidermally. The components can be administered separately, sequentially, intermittently, simultaneously or together or in any combination thereof. One or all of the components of the combination therapy can be administered intravenously or subcutaneously. The soluble hyaluronidase can be administered prior to, simultaneously, sequentially or intermittently with a tumor-targeted taxane; the nucleoside analog can be administered before, after or with the soluble hyaluronidase or with the tumor-targeted taxane. The soluble hyaluronidase can be administered twice weekly, once weekly, once every 14 days, once every 21 days or once every month. The regimen can be determined by the skilled person, and depends upon the type of cancer/tumor, the subject and the selected treatment. For example, the combination therapy can comprise administration of a polymer-conjugated soluble hyaluronidase and a tumor-targeted taxane, where the frequency of administration of the modified soluble hyaluronidase is twice weekly, once weekly, once every 14 days, once every 21 days or once every month; and the frequency of administration of the tumor-targeted taxane is twice weekly, once weekly, once every 14 days, once every 21 days or once every month. The nucleoside analog, such as gemcitabine, can be administered with the tumor-targeted taxane. The cancer for which this treatment is suitable includes stromal cancers, such as pancreatic cancer, particularly PDAC, including metastatic pancreatic ductal adenocarcinoma (PDAC). For example, the combination therapy comprises administration of a polymer-conjugated soluble hyaluronidase, a tumor-targeted taxane and a nucleoside analog; and the soluble hyaluronidase and/or tumor-targeted taxane is administered prior to, simultaneously or near simultaneously, sequentially, or intermittently with the nucleoside analog; or the combination therapy comprises administration of a polymer-conjugated soluble hyaluronidase, a tumor-targeted taxane, and a nucleoside analog; and the soluble hyaluronidase, such as a polymer-conjugated soluble hyaluronidase, and tumor-targeted taxane are:

[0050] administered prior to administration of the nucleoside analog;

[0051] administered simultaneously or near simultaneously; and

[0052] administered at a frequency of administration of twice weekly or once weekly for a predetermined number of weeks. In particular, such as for metastatic pancreatic ductal adenocarcinoma (PDAC), the combination therapy comprises a polymer-conjugated soluble hyaluronidase, nab-paclitaxel or nab-docetaxel, and gemcitabine. The combination therapy with the soluble hyaluronidase can include administration of a corticosteroid, such as a glucocorticoid, such as dexamethasone, to treat or prevent possible adverse musculoskeletal side effects that have occurred from administration of a polymer-conjugated soluble hyaluronidase (see, e.g., U.S. Pat. No. 9,878,046).

[0053] The combination therapy can include another different anti-cancer agent or treatment, such as, but not limited to, an anti-cancer agent or treatment, such as a chemotherapeutic agent, radiation therapy, an antibody, a peptide, gene therapy, oncolytic viral therapy, and a CRISPR-based therapy. Thus, the combination therapy for which the subjects are selected by the methods herein include administering a soluble hyaluronidase, such as a polymer-conjugated soluble hyaluronidase, such as a polymer-conjugated soluble human PH20 hyaluronidase, and a tumor-targeted taxane, such as nab-paclitaxel or nab-docetaxel, and optionally a nucleoside analog or other chemotherapeutic agent/therapy, to a subject identified by the methods herein as one for whom the therapy will be beneficial by increasing one or more of PFS, ORR, and/or OS. The benefit of treatment with the soluble hyaluronidase, such as for a subject with metastatic pancreatic ductal adenocarcinoma (PDAC), can be one or more of increased PFS of at least 1 month, increased ORR of at least 10% and increased OS of at least 7 months compared to therapy with the same cancer treatment without the hyaluronidase.

[0054] Also provided herein are uses of the combinations for identifying subjects who will benefit from cancer therapy that includes treatment with a soluble hyaluronidase agent, compared to a treatment that does not include a soluble hyaluronidase agent, and for treating the subjects so identified. For example, provided herein are uses of the combinations for identifying subjects who will benefit from treatment with a soluble hyaluronidase agent and a tumor-targeted taxane for treating a cancer, compared to a treatment that does not include the soluble hyaluronidase agent, wherein the soluble hyaluronidase agent and tumor-targeted taxane are formulated separately or together, and for treating the subjects so identified. The treatment with a soluble hyaluronidase agent and a tumor-targeted taxane for treating a cancer can be administered simultaneously, separately or sequentially to the identified subject. The benefit is manifested as one or more of PFS, ORR and OS.

[0055] Provided herein are combinations containing an antibody to a degradation product of Type III collagen and a soluble hyaluronidase agent. Also provided herein are combinations containing an antibody to a polypeptide biomarker correlated with formation of Type III collagen and a soluble hyaluronidase agent. The combinations provided herein can include an antibody to a degradation product of Type III collagen. Also provided herein are combinations containing an antibody to a product correlated with formation of Type III collagen, an antibody to a degradation product of Type III collagen and a soluble hyaluronidase agent. In some examples, the degradation product of Type III collagen is C3M. In some examples, the propeptide biomarker correlated to formation of Type III collagen is Pro-C3. Any of the combinations provided herein can further include a tumor-targeted taxane. Any of the combinations provided herein can further include and a nucleoside analog. Any of the combinations provided herein can further contain a composition containing a corticosteroid. The combinations can be for use in the methods of selection and the methods of treatment provided herein, including those summarized above.

[0056] Provided are combinations that include: a) a polymer-conjugated soluble hyaluronidase or a liposome comprising a soluble hyaluronidase; b) a tumor-targeted taxane; c) a first agent that specifically binds to first biomarker associated with Type III collagen degradation in a sample from the subject; and d) a second agent that specifically binds to a second biomarker associated with Type III collagen formation; and, optionally, e) a nucleoside analog. The combinations, which are an association among the components, and which can be packaged as kits, are for use in the methods described above, and include the hyaluronidase, a reagent(s) that reacts with the biomarker(s), and optionally one or more of the other therapeutics administered in the combination therapy.

[0057] As in the methods described above, the biomarkers, antibodies, hyaluronidases, and other therapeutics, such as the tumor-targeted taxane, are as described above in connection with the description of the methods of selecting and treating. The biomarker associated with Type III collagen degradation is a matrix metalloproteinase (MMP) degradation product of Type III collagen that comprises a neo-epitope. The matrix metalloproteinase is MMP-2 or MMP-9. The biomarker associated with Type III collagen degradation can be one that is designated C3M, wherein C3M is a MMP-mediated degradation product of Type III collagen that comprises a neo-epitope (see, e.g., U.S. Pat. Nos. 9,206,464 and 9,606,130). The biomarker designated C3M is produced upon cleavage of type III collagen at a position corresponding to position 610 of human type III collagen (SEQ ID NO:227). The neo-epitope comprises residues corresponding to 610-619 of human type III collagen (SEQ ID NO:227). Antibodies that specifically bind to the biomarker, and not to Type III collagen, can be produced using a polypeptide that consists of residues 610-619 (KNGETGPQGP, SEQ ID NO:226) of human type III collagen.

[0058] The second agent in the combination specifically binds to the biomarker associated with Type III collagen formation that is a neo-epitopic fragment of type III collagen produced in the formation of collagen type III but not produced in the degradation of collagen type III. A biomarker associated with type III collagen formation comprises or is the neo-epitope of released N-terminal pro-peptide of type III collagen (PIIINP), designated Pro-C3. Pro-C3 is an N-terminal propeptide of type III collagen (PIIINP) that comprises the neo-epitope. Pro-C3 comprises the residues corresponding to the C-terminal amino acid sequence CPTGPQNYSP (SEQ ID NO:216) in human type III collagen and is formed by the N-protease cleavage of human type III collagen (SEQ ID NO:227) from intact procollagen type III at the Pro-Gln bond between amino acids P153-Q154 in human type III collagen. The sequence PTGPQNYSP (SEQ ID NO:229) contains the neo-epitope that is in the C-terminal fragment upon cleavage.

[0059] In some embodiments, each agent in the combination that specifically binds to each biomarker is an antibody or antigen binding fragment thereof. One or both of the agents can be a monoclonal antibody; each antibody specifically binds to the fragment comprising the neo-epitope but not to the full-length or longer fragment that does not comprise the neo-epitope. The first antibody specifically binds to the biomarker associated with type III collagen formation and the antibody specifically binds to or was raised against the polypeptide CPTGPQNYSP (SEQ ID NO:216), but does not bind to or binds with lower affinity to the elongated version of the C-terminal amino acid sequence CPTGPQNYSPQZ (SEQ ID NO:228), where: Z is absent or is one or more contiguous amino acids of collagen type III; and the ratio of the affinity of the antibody for CPTGPQNYSP (SEQ ID NO:216) to the affinity of the antibody for a peptide consisting of the amino acid sequence CPTGPQNYSPQZ-COOH (SEQ ID NO:228) is at least 10 to 1 or at least 50 to 1 or at least 100 to 1. The second antibody specifically binds to KNGETGPQGP (SEQ ID NO:226), and does not bind to or binds with lower affinity to the full length collagen type III (SEQ ID NO:227); the affinity of the antibody for KNGETGPQGP (SEQ ID NO:226) compared to the affinity of the second antibody for the full length collagen type III polypeptide is at least 10 to 1 or at least 50 to 1 or at least 100 to 1. In other embodiments, the second antibody specifically binds to KNGETGPQGP (SEQ ID NO:226) and does not bind to or binds with lower affinity to the elongated peptide PGKNGETGPQGP (SEQ ID NO:230), wherein the affinity of the antibody for KNGETGPQGP (SEQ ID NO:226) compared to the affinity of the antibody for the elongated polypeptide is at least 10 to 1 or at least 50 to 1 or at least 100 to 1.

[0060] In some embodiments, each antibody is a monoclonal antibody, or an antigen-binding fragment thereof, or is a fab or a single chain antibody. In particular embodiments, the antibody that binds to Pro-C3 is designated NB61N-62; and the antibody that binds to C3M is designated CO3-610C.

[0061] Exemplary of combinations is one in which: the hyaluronidase is a polymer-conjugated soluble hyaluronidase; the tumor-targeted taxane is an albuminated taxane; the first agent that binds to the biomarker associated with Type III collagen degradation is an antibody raised against the neo-epitope in the biomarker C3M; and the second agent that binds to the biomarker associated with Type III collagen formation is an antibody raised against the neo-epitope in the biomarker Pro-C3.

[0062] In particular embodiments, the soluble hyaluronidase is a polymer-conjugated soluble hyaluronidase. Polymer moieties include, but are not limited to, sialation or PEGylation moieties. The soluble hyaluronidase can be a soluble PH20, such as a soluble PH20 is selected from among an ovine, mouse, monkey, bovine, bacterial and human PH20. In embodiments in which the soluble hyaluronidase is a soluble human PH20 it can be selected from among:

[0063] a) a polypeptide that is encoded by a nucleic acid molecule encoding a C-terminally truncated polypeptide of the polypeptide set forth in SEQ ID NO:1, where the C-terminal amino acid residue is selected from among 467 to 495 of SEQ ID NO:1 or 474 to 483 of SEQ ID NO:1;

[0064] b) a polypeptide that has at least about 91% amino acid sequence identity with a sequence of amino acids set forth in a), whereby the soluble hyaluronidase is soluble, N-glycosylated and neutral active; and

[0065] c) a soluble PH20 hyaluronidase that has at least 98% sequence identity with residues 36-483 of SEQ ID NO:1. Exemplary of the soluble hyaluronidases are those describe above with respect to the methods, including a soluble hyaluronidase has the sequence of amino acids set forth as amino acids 36-467, 36-468, 36-469, 36-470, 36-471, 36-472, 36-473, 36-474, 36-475, 36-476, 36-477, 36-478, 36-479, 36-480, 36-481, 36-482, or 36-483 of SEQ ID NO:1, or has at least about 91% or 95% or 98% amino acid sequence identity with a sequence of amino acids set forth as amino acids 36-467, 36-468, 36-469, 36-470, 36-471, 36-472, 36-473, 36-474, 36-475, 36-476, 36-477, 36-478, 36-479, 36-480, 36-481, 36-482, or 36-483 of SEQ ID NO:1, such as, but not limited to a soluble hyaluronidase is selected from among polypeptides containing a sequence of amino acids set forth in any of SEQ ID NOs: 4-9 and 46-48, and variants thereof that exhibit at least 91% sequence identity to any of SEQ ID NOs: 4-9 and 46-48.

[0066] The soluble hyaluronidases in the combinations can be polymer-conjugated soluble hyaluronidases, such as a PEGylated or sialylated. PEGylation moieties include those that result from reaction with a PEG reagent selected from among methoxy-poly(ethylene glycol)-succinimidyl butanoate (mPEG-SBA) (5 kDa); methoxy-poly(ethylene glycol)-succinimidyl butanoate (mPEG-SBA) (20 kDa); methoxy-poly(ethylene glycol)-succinimidyl butanoate (mPEG-SBA) (30 kDa); methoxy-poly(ethylene glycol)-succinimidyl α-methylbutanoate (mPEG-SMB) (20 kDa); methoxy-poly(ethylene glycol)-succinimidyl α-methylbutanoate (mPEG-SMB) (30 kDa); methoxy-poly(ethylene glycol)-butyraldehyde (mPEG-butyraldehyde) (30 kDa), methoxy-poly(ethylene glycol)-succinimidyl propionate (mPEG-SPA) (20 kDa); methoxy-poly(ethylene glycol)-succinimidyl propionate (mPEG-SPA) (30 kDa); (methoxy-poly(ethylene glycol)) 2-N-hydroxysuccinimide ester (mPEG2-NHS) (10 kDa branched); (methoxy-poly(ethylene glycol)) 2-N-hydroxysuccinimide ester (mPEG2-NHS) (20 kDa branched); (methoxy-poly(ethylene glycol)) 2-N-hydroxysuccinimide ester (mPEG2-NHS) (40 kDa branched); (methoxy-poly(ethylene glycol)) 2-N-hydroxysuccinimide ester (mPEG2-NHS) (60 kDa branched); biotin-poly(ethylene glycol)-N-hydroxysuccinimide ester (biotin-PEG-NHS) (5 kDa biotinylated); poly(ethylene glycol)-p-nitrophenyl carbonate (PEG-p-nitrophenyl-carbonate) (30 kDa); and poly(ethylene glycol)-propionaldehyde (PEG-propionaldehyde) (30 kDa). The PEG can be a branched or linear PEG; the PEG can be methoxy-PEG (mPEG), such as a linear N-hydroxysuccinimidyl ester of methoxy poly(ethylene glycol) butanoic acid. The PEG can have a molecular weight of 20, 30, 40, 50, 60, 70, 80, 90, 100 kilodaltons, or about 20, 30, 40, 50, 60, 70, 80, 90, 100 kilodaltons, such 30 or about 30 kilodaltons. On average the soluble PH20 can have on the average 2-6, such as 3-5, PEG moieties per hyaluronidase molecule.

[0067] The tumor-targeted taxane in the combination can be comprised of a taxane linked directly or indirectly to a tumor targeting moiety, such as a protein, such as an antibody or antigen binding fragment thereof, or an enzyme or modified enzyme that does not have catalytic activity, that specifically binds to a tumor or tumor antigen or other moiety, such as albumin, that targets the taxane to a tumor. Exemplary taxanes are paclitaxel, docetaxel and analogs thereof. Exemplary tumor-targeted taxanes are nab-paclitaxel and nab-docetaxel. The tumor-targeted taxane can be formulated as a delivery vehicle selected from among a micelle, nanoparticle, microsphere, liposome or hydrogel, where the delivery vehicle is linked directly or indirectly to a tumor targeting moiety. The tumor targeting moiety can be selected from among a macromolecule, a protein, a peptide, a monoclonal antibody or a fatty acid lipid. Antibodies include, monoclonal antibodies, such as Cetuximab or Trastuzumab or an antigen-binding fragment thereof. Albumin is exemplary of a tumor targeting moiety. The combinations can include a nucleoside analog as described above for the methods. Exemplary are a nucleoside analog that is a purine or pyrimidine analog or derivatives thereof, where the nucleoside analog is a chemotherapeutic. Exemplary of nucleoside analogs is fluoropyrimidine 5-fluorouracil, 5-fluoro-2′-deoxycytidine, cytarabine, gemcitabine, troxacitabine, decitabine, Azacytidine, pseudoisocytidine, Zebularine, Ancitabine, Fazarabine, 6-azacytidine, capecitabine, N4-octadecyl-cytarabine, elaidic acid cytarabine, fludarabine, cladribine, clofarabine, nelarabine, forodesine, and pentostatin, or derivatives thereof. In particular, the combinations include gemcitabine. The combinations can be provided as a kit that optionally includes instructions for use, wherein a kit is a packaged combination.

[0068] The combinations can be used for selection of a subject for treatment of cancer, and for treatment of cancer. Uses can be any of those described for the methods. Cancers include any cancer, particular those with tumors with stromal barriers. In particular, the combinations are used for selection of subjects who have pancreatic ductal adenocarcinoma (PDAC), such as metastatic PDAC, for treatment that includes a soluble hyaluronidase. The methods described herein can be used for selection of a subject for treatment of cancer with a combination therapy comprising a polymer-conjugated soluble hyaluronidase, particularly for subjects with pancreatic ductal adenocarcinoma (PDAC) and metastatic PDAC.

[0069] In the provided combinations, compositions, methods and uses herein, the soluble hyaluronidase agent is a hyaluronan degrading enzyme or is an agent that inhibits hyaluronan synthesis. In some examples, the soluble hyaluronidase agent is a hyaluronan degrading enzyme that is a hyaluronidase. In other examples, the soluble hyaluronidase agent is a hyaluronan-degrading enzyme that is conjugated to a polymer. In some examples, the soluble hyaluronidase agent is an agent that inhibits hyaluronan synthesis that is selected from a sense or antisense nucleic acid molecule against an HA synthase or is a small molecule drug. In some examples, the soluble hyaluronidase agent is a small molecule drug selected from 4-methylumbelliferone (MU) or a derivative thereof, or leflunomide or a derivative thereof. In other examples, the soluble hyaluronidase agent is a small molecule drug that is a derivative of 4-methylumbelliferone (MU) selected from 6,7-dihydroxy-4-methyl coumarin or 5,7-dihydroxy-4-methyl coumarin.

[0070] In any of the examples of the combinations and methods provided herein, the soluble hyaluronidase agent is a hyaluronan-degrading enzyme and the hyaluronan-degrading enzyme composition contains or is formulated to contain between or about between 0.5 μg to 50 mg, 100 μg to 1 mg, 1 mg to 20 mg, 100 μg to 5 mg, 0.5 μg to 1450 μg, 1 μg to 1000 μg, 5 μg to 1250 μg, 10 μg to 750 μg, 50 μg to 500 μg, 0.5 μg to 500 μg, or 500 μg to 1450 μg hyaluronan-degrading enzyme conjugated to a polymer. In other examples of the combinations provided herein, the hyaluronan-degrading enzyme conjugated to a polymer has a specific activity of at least or about 20,000 U/mg, 25,000 U/mg, 30,000 U/mg, 31,000 U/mg, 32,000 U/mg, 33,000 U/mg, 34,000 U/mg, 35,000 U/mg, 36,000 U/mg, 37,000 U/mg, 38,000 U/mg, 39,000 U/mg, 40,000 U/mg, 45,000 U/mg, 50,000 U/mg, 55,000 U/mg, 60,000 U/mg or more. In further examples of the combinations provided herein, the hyaluronan-degrading enzyme composition contains between or about between 150 Units (U) to 60,000 U, 300 U to 30,000 U, 500 U to 25,000 U, 500 U to 10,000 U, 150 U to 15,000 U, 150 U to 5000 U, 500 U to 1000 U, 5000 U to 45,000 U 10,000 U to 50,000 U or 20,000 U to 60,000 U hyaluronan-degrading enzyme conjugated to a polymer. The volume of the composition containing the hyaluronan-degrading enzyme can be between or can be about between 0.5 mL to 100 mL, 0.5 mL to 50 mL, 0.5 mL to 10 mL, 1 mL to 40 mL, 1 mL to 20 mL, 1 mL to 10 mL, or 3 mL to 10 mL. In some examples of the combinations provided herein, the composition containing a hyaluronan-degrading enzyme contains histidine and/or NaCl. In other examples, the composition containing a hyaluronan-degrading enzyme has a pH that is between or about between 6.0 to 7.4.

[0071] In any of the examples of the combinations, methods and uses provided herein, the hyaluronan-degrading enzyme is a hyaluronidase. For example, the hyaluronidase can be a PH20 or truncated form thereof that lacks a C-terminal glycosylphosphatidylinositol (GPI) attachment site or a portion of the GPI attachment site. In some examples, the hyaluronidase is a PH20 that is a human or non-human PH20. In a specific example, the hyaluronan-degrading enzyme is a truncated PH20 and the truncated PH20 contains a sequence of amino acids that contains amino acids 36-464 of SEQ ID NO:1, or contains a sequence of amino acids that has at least 85% sequence identity to a sequence of amino acids that contains at least amino acids 36-464 of SEQ ID NO:1 and retains hyaluronidase activity. In some examples, the hyaluronidase is PH20 that contains a sequence of amino acids that has at least 86%, 8′7%, 88%, 89%, 90%, 91%, 92%, 93%, 94%, 95%, 96%, 97%, 98% or 99% sequence identity to a sequence of amino acids that contains at least amino acids 36-464 of SEQ ID NO:1 and retains hyaluronidase activity.

[0072] In any of the examples of the combinations, methods and uses provided herein, the PH20 contains a sequence of amino acids that contains a C-terminal truncation after amino acid position 465, 466, 467, 468, 469, 470, 471, 472, 473, 474, 475, 476, 477, 478, 479, 480, 481, 482, 483, 484, 485, 486, 487, 488, 489, 490, 491, 492, 493, 494, 495, 496, 497, 498, 499 or 500 of the sequence of amino acids set forth in SEQ ID NO:1, or is a variant thereof that exhibits at least 85% sequence identity to a sequence of amino acids that contains a C-terminal truncation after amino acid position 465, 466, 467, 468, 469, 470, 471, 472, 473, 474, 475, 476, 477, 478, 479, 480, 481, 482, 483, 484, 485, 486, 487, 488, 489, 490, 491, 492, 493, 494, 495, 496, 497, 498, 499 or 500 of the sequence of amino acids set forth in SEQ ID NO:1 and retains hyaluronidase activity. For example, the PH20 contains a sequence of amino acids that has at least 86%, 87%, 88%, 89%, 90%, 91%, 92%, 93%, 94%, 95%, 96%, 97%, 98% or 99% sequence identity to a sequence of amino acids that contains a C-terminal truncation after amino acid position 465, 466, 467, 468, 469, 470, 471, 472, 473, 474, 475, 476, 477, 478, 479, 480, 481, 482, 483, 484, 485, 486, 487, 488, 489, 490, 491, 492, 493, 494, 495, 496, 497, 498, 499 or 500 of the sequence of amino acids set forth in SEQ ID NO:1 and retains hyaluronidase activity.

[0073] In any of the examples of the combinations, methods and uses provided herein, the tumor-targeted taxane is paclitaxel or docetaxel or is an analog, derivative or prodrug thereof. The tumor-targeted taxane can be linked directly or indirectly to a tumor targeting moiety. In some examples, the tumor-targeted taxane is formulated as a delivery vehicle selected from among a micelle, nanoparticle, microsphere, liposomes or hydrogel. The delivery vehicle can be linked directly or indirectly to a tumor targeting moiety. In some examples, the tumor targeting moiety is selected from among a macromolecule, a protein, a peptide, a monoclonal antibody or a fatty acid lipid. In other examples, the tumor targeting moiety is a monoclonal antibody selected from among cetuximab or trastuzumab. In yet other examples, the tumor targeting moiety is albumin. In some examples, the tumor-targeted taxane is albumin-bound paclitaxel or albumin-bound docetaxel.

[0074] In any of the examples of the combinations, methods and uses provided herein, the tumor-targeted taxane composition contains or is formulated to contain between or about between 10 mg to 1000 mg, such as 20 mg to 500 mg, 10 mg to 250 mg, 75 mg to 400 mg, 100 mg to 200 mg, 150 mg to 400 mg, 200 mg to 800 mg, 50 mg to 200 mg or 50 mg to 150 mg tumor-targeted taxane. In other examples, the volume of the composition containing a tumor targeted taxane is between or about between 0.5 mL to 100 mL, 1 mL to 500 mL, 0.5 mL to 50 mL, 0.5 mL to 10 mL, 1 mL to 40 mL, 1 mL to 20 mL, 1 mL to 10 mL, or 3 mL to 10 mL.

[0075] In any of the examples of the combinations, methods and uses provided herein, the nucleoside analog is a purine or pyrimidine analog or derivatives thereof.

[0076] In some examples, the nucleoside analog is selected from among fluoropyrimidine 5-fluorouracil, 5-fluoro-2′-deoxycytidine, cytarabine, gemcitabine, troxacitabine, decitabine, Azacytidine, pseudoisocytidine, Zebularine, Ancitabine, Fazarabine, 6-azacytidine, capecitabine, N⁴-octadecyl-cytarabine, elaidic acid cytarabine, fludarabine, cladribine, clofarabine, nelarabine, forodesine, and pentostatin, or derivatives thereof. In one example, the nucleoside analog is a substrate for a nucleoside deaminase that is adenosine deaminase or cytidine deaminase. In some examples, the nucleoside analog is selected from among fludarabine, cytarabine, gemcitabine, decitabine and azacytidine or derivatives thereof. In any of the examples of the combinations, methods and uses provided herein, the nucleoside analog composition contains or is formulated to contain 100 mg to 5000 mg, 500 mg to 5000 mg, 500 mg to 2500 mg, 1000 mg to 2500 mg, 1500 mg to 2500 mg or 2000 mg to 5000 mg of a nucleoside analog. In other examples, the volume of the composition containing a nucleoside analog is between or about between 0.5 mL to 1000 mL, such as 0.5 mL to 100 mL, 0.5 mL to 10 mL, 1 mL to 500 mL, or 1 mL to 10 mL.

[0077] Any of the combinations, methods and uses provided herein can further contain a composition containing a corticosteroid. In some examples, the corticosteroid is a glucocorticoid that is selected from among cortisones, dexamethasones, hydrocortisones, methylprednisolones, prednisolones and prednisones. In some examples, the corticosteroid composition contains or is formulated to contain between at or about 0.1 to 20 mgs, 0.1 to 15 mgs, 0.1 to 10 mgs, 0.1 to 5 mgs, 0.2 to 20 mgs, 0.2 to 15 mgs, 0.2 to 10 mgs, 0.2 to 5 mgs, 0.4 to 20 mgs, 0.4 to 15 mgs, 0.4 to 10 mgs, 0.4 to 5 mgs, 0.4 to 4 mgs, 1 to 20 mgs, 1 to 15 mgs or 1 to 10 mgs corticosteroid.

[0078] In any of the examples of the combinations, method and uses provided herein, the composition(s) is (are) formulated for administration orally, intravenously (IV), subcutaneously, intramuscularly, intra-tumorally, intradermally, topically, transdermally, rectally, intrathecally or sub-epidermally. For example, the composition(s) is (are) formulated for intravenous administration or subcutaneous administration.

[0079] In any of the examples of the combinations, methods and uses provided herein, the polymer is a polyalkylene glycol, dextran, pullulan or cellulose. In one example, the polymer is a polyalkylene glycol that is selected from among polyethylene glycols (PEG) or methoxypolyethylene glycols (mPEG). In a specific example, the polymer is a PEG, and the PEG is a branched or linear PEG. In some examples, the polymer is produced by reaction with methoxy-poly(ethylene glycol)-succinimidyl butanoate (mPEG-SBA) (5 kDa); methoxy-poly(ethylene glycol)-succinimidyl butanoate (mPEG-SBA) (20 kDa); methoxy-poly(ethylene glycol)-succinimidyl butanoate (mPEG-SBA) (30 kDa); methoxy-poly(ethylene glycol)-succinimidyl α-methylbutanoate (mPEG-SMB) (20 kDa); methoxy-poly(ethylene glycol)-succinimidyl α-methylbutanoate (mPEG-SMB) (30 kDa); methoxy-poly(ethylene glycol)-butyraldehyde (mPEG-butyraldehyde) (30 kDa), methoxy-poly(ethylene glycol)-succinimidyl propionate (mPEG-SPA) (20 kDa); methoxy-poly(ethylene glycol)-succinimidyl propionate (mPEG-SPA) (30 kDa); (methoxy-poly(ethylene glycol)) 2-N-hydroxysuccinimide ester (mPEG2-NHS) (10 kDa branched); (methoxy-poly(ethylene glycol)) 2-N-hydroxysuccinimide ester (mPEG2-NHS) (20 kDa branched); (methoxy-poly(ethylene glycol)) 2-N-hydroxysuccinimide ester (mPEG2-NHS) (40 kDa branched); (methoxy-poly(ethylene glycol)) 2-N-hydroxysuccinimide ester (mPEG2-NHS) (60 kDa branched); biotin-poly(ethylene glycol)-N-hydroxysuccinimide ester (biotin-PEG-NHS) (5 kDa biotinylated); poly(ethylene glycol)-p-nitrophenyl carbonate (PEG-p-nitrophenyl-carbonate) (30 kDa); or poly(ethylene glycol)-propionaldehyde (PEG-propionaldehyde) (30 kDa). In specific examples, the polymer is a PEG that has a molecular weight of 30 or about 30 kilodaltons.

[0080] Any of the combinations provided herein can be packaged as a kit and optionally include instructions for use.

[0081] In any of the examples of the provided methods, combinations or uses herein, the subject selected for treatment has a cancer that is a tumor. In one example, the tumor is a solid tumor. In any of the examples of the method or uses herein, the tumor has increased cellular and/or stromal expression of a hyaluronan, compared to a non-cancerous tissue of the same tissue type or compared to a non-metastatic tumor of the same tumor-type. In any of the examples of the methods or uses provided herein, the cancer is selected from among pancreatic cancer, ovarian cancer, lung cancer, colon cancer, prostate cancer, cervical cancer, head and neck cancer and breast cancer. In a specific example, the cancer is pancreatic cancer, such as metastatic pancreatic ductal adenocarcinoma (PDAC).

[0082] In any of the examples of the methods or uses provided herein, the hyaluronan-degrading enzyme is a hyaluronidase. For example, the hyaluronidase is a PH20 or truncated form thereof that lacks a C-terminal glycosylphosphatidylinositol (GPI) attachment site or a portion of the GPI attachment site. In a specific example, the hyaluronidase is a PH20 that is a human or non-human PH20. In a particular example, the hyaluronan-degrading enzyme is a truncated PH20 and the truncated PH20 contains a sequence of amino acids that contains amino acids 36-464 of SEQ ID NO:1, or contains a sequence of amino acids that has at least 85% sequence identity to a sequence of amino acids that contains at least amino acids 36-464 of SEQ ID NO:1 and retains hyaluronidase activity. In some examples, the PH20 contains a sequence of amino acids that has at least 86%, 87%, 88%, 89%, 90%, 91%, 92%, 93%, 94%, 95%, 96%, 97%, 98% or 99% sequence identity to a sequence of amino acids that contains at least amino acids 36-464 of SEQ ID NO:1 and retains hyaluronidase activity. In other examples, the PH20 contains a sequence of amino acids that contains a C-terminal truncation after amino acid position 465, 466, 467, 468, 469, 470, 471, 472, 473, 474, 475, 476, 477, 478, 479, 480, 481, 482, 483, 484, 485, 486, 487, 488, 489, 490, 491, 492, 493, 494, 495, 496, 497, 498, 499 or 500 of the sequence of amino acids set forth in SEQ ID NO:1, or is a variant thereof that exhibits at least 85% sequence identity to a sequence of amino acids that contains a C-terminal truncation after amino acid position 465, 466, 467, 468, 469, 470, 471, 472, 473, 474, 475, 476, 477, 478, 479, 480, 481, 482, 483, 484, 485, 486, 487, 488, 489, 490, 491, 492, 493, 494, 495, 496, 497, 498, 499 or 500 of the sequence of amino acids set forth in SEQ ID NO:1 and retains hyaluronidase activity. In yet other examples, the PH20 contains a sequence of amino acids that has at least 86%, 87%, 88%, 89%, 90%, 91%, 92%, 93%, 94%, 95%, 96%, 97%, 98% or 99% sequence identity to a sequence of amino acids that contains that contains a C-terminal truncation after amino acid position 465, 466, 467, 468, 469, 470, 471, 472, 473, 474, 475, 476, 477, 478, 479, 480, 481, 482, 483, 484, 485, 486, 487, 488, 489, 490, 491, 492, 493, 494, 495, 496, 497, 498, 499 or 500 of the sequence of amino acids set forth in SEQ ID NO:1 and retains hyaluronidase activity.

[0083] In any of the examples of the methods or uses provided herein, the polymer is a polyalkylene glycol, dextran, pullulan or cellulose. In one example, the polymer is a polyalkylene glycol that is selected from among polyethylene glycols (PEG) or methoxypolyethylene glycols (mPEG). In a specific example, the polymer is a PEG, and the PEG is a branched or linear PEG. In any of the examples of the methods or uses provided herein, the polymer is produced by reaction with methoxy-poly(ethylene glycol)-succinimidyl butanoate (mPEG-SBA) (5 kDa); methoxy-poly(ethylene glycol)-succinimidyl butanoate (mPEG-SBA) (20 kDa); methoxy-poly(ethylene glycol)-succinimidyl butanoate (mPEG-SBA) (30 kDa); methoxy-poly(ethylene glycol)-succinimidyl α-methylbutanoate (mPEG-SMB) (20 kDa); methoxy-poly(ethylene glycol)-succinimidyl α-methylbutanoate (mPEG-SMB) (30 kDa); methoxy-poly(ethylene glycol)-butyraldehyde (mPEG-butyraldehyde) (30 kDa), methoxy-poly(ethylene glycol)-succinimidyl propionate (mPEG-SPA) (20 kDa); methoxy-poly(ethylene glycol)-succinimidyl propionate (mPEG-SPA) (30 kDa); (methoxy-poly(ethylene glycol)) 2-N-hydroxysuccinimide ester (mPEG2-NHS) (10 kDa branched); (methoxy-poly(ethylene glycol)) 2-N-hydroxysuccinimide ester (mPEG2-NHS) (20 kDa branched); (methoxy-poly(ethylene glycol)) 2-N-hydroxysuccinimide ester (mPEG2-NHS) (40 kDa branched); (methoxy-poly(ethylene glycol)) 2-N-hydroxysuccinimide ester (mPEG2-NHS) (60 kDa branched); biotin-poly(ethylene glycol)-N-hydroxysuccinimide ester (biotin-PEG-NHS) (5 kDa biotinylated); poly(ethylene glycol)-p-nitrophenyl carbonate (PEG-p-nitrophenyl-carbonate) (30 kDa); or poly(ethylene glycol)-propionaldehyde (PEG-propionaldehyde) (30 kDa). In a specific example, the polymer is a PEG that has a molecular weight of 30 or about 30 kilodaltons.

[0084] In any of the examples of the methods or uses provided herein, the hyaluronan-degrading enzyme is administered in or is formulated for administration in a dosage range amount of between or about between 0.01 μg/kg to 25 mg/kg (of the subject), 0.5 μg/kg to 25 mg/kg, 0.5 μg/kg to 10 mg/kg, 0.02 mg/kg to 1.5 mg/kg, 0.01 μg/kg to 15 μg/kg, 0.05 μg/kg to 10 μg/kg, 0.75 μg/kg to 7.5 μg/kg or 1.0 μg/kg to 3.0 μg/kg (of the subject). In any of the examples of the methods or uses provided herein, the hyaluronan-degrading enzyme is administered in or is formulated for administration in a dosage range amount of between or about between 1 Unit/kg to 800,000 Units/kg (of the subject), such as 10 to 800,000 Units/kg, 10 to 750,000 Units/kg, 10 to 700,000 Units/kg, 10 to 650,000 Units/kg, 10 to 600,000 Units/kg, 10 to 550,000 Units/kg, 10 to 500,000 Units/kg, 10 to 450,000 Units/kg, 10 to 400,000 Units/kg, 10 to 350,000 Units/kg, 10 to 320,000 Units/kg, 10 to 300,000 Units/kg, 10 to 280,000 Units/kg, 10 to 260,000 Units/kg, 10 to 240,000 Units/kg, 10 to 220,000 Units/kg, 10 to 200,000 Units/kg, 10 to 180,000 Units/kg, 10 to 160,000 Units/kg, 10 to 140,000 Units/kg, 10 to 120,000 Units/kg, 10 to 100,000 Units/kg, 10 to 80,000 Units/kg, 10 to 70,000 Units/kg, 10 to 60,000 Units/kg, 10 to 50,000 Units/kg, 10 to 40,000 Units/kg, 10 to 30,000 Units/kg, 10 to 20,000 Units/kg, 10 to 15,000 Units/kg, 10 to 12,800 Units/kg, 10 to 10,000 Units/kg, 10 to 9,000 Units/kg, 10 to 8,000 Units/kg, 10 to 7,000 Units/kg, 10 to 6,000 Units/kg, 10 to 5,000 Units/kg, 10 to 4,000 Units/kg, 10 to 3,000 Units/kg, 10 to 2,000 Units/kg, 10 to 1,000 Units/kg, 10 to 900 Units/kg, 10 to 800 Units/kg, 10 to 700 Units/kg, 10 to 500 Units/kg, 10 to 400 Units/kg, 10 to 300 Units/kg, 10 to 200 Units/kg, 10 to 100 Units/kg, 16 to 600,000 Units/kg, 16 to 500,000 Units/kg, 16 to 400,000 Units/kg, 16 to 350,000 Units/kg, 16 to 320,000 Units/kg, 16 to 160,000 Units/kg, 16 to 80,000 Units/kg, 16 to 40,000 Units/kg, 16 to 20,000 Units/kg, 16 to 16,000 Units/kg, 16 to 12,800 Units/kg, 16 to 10,000 Units/kg, 16 to 5,000 Units/kg, 16 to 4,000 Units/kg, 16 to 3,000 Units/kg, 16 to 2,000 Units/kg, 16 to 1,000 Units/kg, 16 to 900 Units/kg, 16 to 800 Units/kg, 16 to 700 Units/kg, 16 to 500 Units/kg, 16 to 400 Units/kg, 16 to 300 Units/kg, 16 to 200 Units/kg, 16 to 100 Units/kg, 160 to 12,800 Units/kg, 160 to 8,000 Units/kg, 160 to 6,000 Units/kg, 160 to 4,000 Units/kg, 160 to 2,000 Units/kg, 160 to 1,000 Units/kg, 160 to 500 Units/kg, 500 to 5000 Units/kg, 1000 to 100,000 Units/kg or 1000 to 10,000 Units/kg (of the subject).

[0085] In any of the examples of the methods or uses provided herein, the tumor-targeted taxane is paclitaxel or docetaxel or is an analog, derivative or prodrug thereof. The tumor-targeted taxane can be linked directly or indirectly to a tumor targeting moiety. In some examples, the tumor-targeted taxane is formulated as a delivery vehicle selected from among a micelle, nanoparticle, microsphere, liposomes or hydrogel. The delivery vehicle can be linked directly or indirectly to a tumor targeting moiety. In some examples, the tumor targeting moiety is selected from among a macromolecule, a protein, a peptide, a monoclonal antibody or a fatty acid lipid. In other examples, the tumor targeting moiety is a monoclonal antibody selected from among cetuximab or trastuzumab. In yet another example, the tumor targeting moiety is albumin. In a particular example, the tumor-targeted taxane is albumin-bound paclitaxel or albumin-bound docetaxel. In any of the examples of the methods or uses provided herein the tumor-targeted taxane is administered in or is formulated for administration in a dosage range that is between or about between 1 mg/m² to 1000 mg/m² (body surface area of the subject), 10 mg/m² to 500 mg/m², 50 mg/m² to 400 mg/m², or 25 mg/m² to 300 mg/m².

[0086] The combinations and kits and methods and uses provided herein, can be used for selection of a subject for treatment of cancer, where the treatment includes a soluble hyaluronidase, such as a polymer-conjugated soluble hyaluronidase, such as a PEGylated soluble hyaluronidase or any of the forms described herein or known to those of skill in the art. The cancers include any cancers known, particularly solid tumors, including any listed herein. In particular embodiments, the cancer is pancreatic ductal adenocarcinoma (PDAC), including cancer that is metastatic pancreatic ductal adenocarcinoma (PDAC). The methods of selection can be combined with treatment, by identifying the subjects and then treating them with the hyaluronidase and agent suitable for the particular cancer.

[0087] In any of the examples of the methods or uses provided herein, the nucleoside analog is a purine or pyrimidine analog or derivatives thereof. In any of the examples, the nucleoside analog is selected from among fluoropyrimidine 5-fluorouracil, 5-fluoro-2′-deoxycytidine, cytarabine, gemcitabine, troxacitabine, decitabine, Azacytidine, pseudoisocytidine, Zebularine, Ancitabine, Fazarabine, 6-azacytidine, capecitabine, N⁴-octadecyl-cytarabine, elaidic acid cytarabine, fludarabine, cladribine, clofarabine, nelarabine, forodesine, and pentostatin, or derivatives thereof. In a particular example, the nucleoside analog is a substrate for a nucleoside deaminase and the nucleoside deaminase is adenosine deaminase or cytidine deaminase. In other examples, the nucleoside analog is selected from among fludarabine, cytarabine, gemcitabine, decitabine and azacytidine or derivatives thereof. In yet other examples, the nucleoside analog is gemcitabine or a derivative thereof. In any of the examples of the methods or uses provided herein, the nucleoside analog is administered in or is formulated for administration in a dosage range that is between or between about 100 mg/m² to 2500 mg/m², 500 mg/m² to 2000 mg/m², 750 mg/m² to 1500 mg/m², 1000 mg/m² to 1500 mg/m², or 500 mg/m² to 1500 mg/m². In other examples of the methods or uses provided herein, the nucleoside analog is administered in or is formulated for administration in an amount that is at least or at least about 200 mg/m² or 500 mg/m² but that is less than 1000 mg/m² or 1250 mg/m².

[0088] In any of examples of the methods or uses provided herein, composition(s) are administered or are formulated for administration orally, intravenously (IV), subcutaneously, intramuscularly, intra-tumorally, intradermally, topically, transdermally, rectally, intrathecally or sub-epidermally. In a particular example, the composition(s) is (are) administered intravenously or subcutaneously. In any of the methods or uses herein, the hyaluronan-degrading enzyme is administered or is used prior to, simultaneously or near simultaneously, sequentially or intermittently with the tumor-targeted taxane.

[0089] In examples of the methods provided herein, the hyaluronan-degrading enzyme is administered prior to administration of the tumor-targeted taxane. In one example, the hyaluronan-degrading enzyme is administered at least or at least about or about or 5 minutes, 15 minutes, 30 minutes, 1 hour, 2 hours, 3 hours, 4 hours, 6 hours, 8 hours, 12 hours, 16 hours, 18 hours, 20 hours, 22 hours, 24 hours, 30 hours, 36 hours, 40 hours or 48 hours prior to administration of the tumor-targeted taxane. In another example of the methods provided herein, the hyaluronan-degrading enzyme and tumor-targeted taxane are administered simultaneously or near simultaneously.

[0090] In any of the examples of the methods provided herein, the frequency of administration of the hyaluronan-degrading enzyme is twice weekly, once weekly, once every 14 days, once every 21 days or once every month. In other examples, the frequency of administration of the tumor-targeted taxane is twice weekly, once weekly, once every 14 days, once every 21 days or once every month. In any of the examples of the methods or uses provided herein, the hyaluronan-degrading enzyme and/or tumor-targeted taxane is administered or is formulated for administration prior to, simultaneously or near simultaneously, sequentially, or intermittently with the nucleoside analog.

[0091] In any of the examples of the methods or uses provided herein, the hyaluronan-degrading enzyme and tumor-targeted taxane are administered for a predetermined number of weeks in a cycle of administration. In one example, the predetermined number of weeks can be at least two weeks, at least three weeks or at least four weeks. In some examples, the hyaluronan-degrading enzyme is administered at least or at least about or about or 5 minutes, 15 minutes, 30 minutes, 1 hour, 2 hours, 3 hours, 4 hours, 6 hours, 8 hours, 12 hours, 16 hours, 18 hours, 20 hours, 22 hours, 24 hours, 30 hours, 36 hours, 40 hours or 48 hours prior to administration of the nucleoside analog. In some examples, the tumor-targeted taxane is administered at least or at least about or about or 1 hour, 2 hours, 3 hours, 4 hours, 6 hours, 8 hours, 12 hours, 16 hours, 18 hours, 20 hours, 22 hours or 24 hours prior to administration of the nucleoside analog. In a particular example, the tumor-targeted taxane is administered simultaneously or near simultaneously with the nucleoside analog. In the provided methods, the frequency of administration of the nucleoside analog can be twice weekly, once weekly, once every 14 days, once every 21 days or once every month. In some examples, the nucleoside analog is administered for a predetermined number of weeks in a cycle of administration. For example, the predetermined number of weeks can be at least two weeks, at least three weeks or at least four weeks. In other examples of the methods provided herein, after the predetermined number of weeks of administration of the nucleoside analog, administration is discontinued for a first predetermined period of time, and then resumed for at least one week.

[0092] In particular examples of the methods or uses provided herein, the hyaluronan-degrading enzyme and tumor-targeted taxane are administered prior to administration of the nucleoside analog; administered simultaneously or near simultaneously; and administered at a frequency of administration of twice weekly or once weekly for a predetermined number of weeks. In some examples, the predetermined number of weeks is four weeks. In such examples, the nucleoside analog is administered at least or at least about or about or 5 minutes, 15 minutes, 30 minutes, 1 hour, 2 hours, 3 hours, 4 hours, 6 hours, 8 hours, 12 hours, 16 hours, 18 hours, 20 hours, 22 hours, 24 hours, 30 hours, 36 hours, 40 hours or 48 hours after administration of the hyaluronan-degrading enzyme and tumor-targeted taxane.

[0093] In any of the examples of the methods or uses provided herein, the nucleoside analog or other anti-cancer agent is administered once weekly for a predetermined number of weeks. In one example, the predetermined number of weeks is three weeks. In such examples, the administration can be discontinued for at least one week.

[0094] In any of the methods or uses provided herein, the cycle of administration and/or discontinuation of administration can be repeated a plurality of times. In some examples, the frequency of administration in the first cycle of administration is the same or different than the frequency of administration in subsequent cycles of administration. For example, frequency of administration is twice weekly in the first cycle of administration and once weekly for subsequent cycles of administration.

[0095] Any of the methods or uses provided herein can further include a step of administering a corticosteroid or a treatment that includes administering a corticosteroid. In any of such examples, the corticosteroid is a glucocorticoid that can be selected from among cortisones, dexamethasones, hydrocortisones, methylprednisolones, prednisolones and prednisones. In some examples of the method or uses provided herein, the corticosteroid is administered prior to, concurrent with, intermittently with or subsequent to administration of a hyaluronan-degrading enzyme. In one example, the corticosteroid is co-administered with the hyaluronan-degrading enzyme. In another example, the corticosteroid is administered at least or about at least 1 hour prior to administration of the hyaluronan-degrading enzyme. In another example of the provided methods, the corticosteroid is administered at least 8 hours to 12 hours after administration of the hyaluronan-degrading enzyme. In some examples, the amount of corticosteroid administered or that is formulated for administration is between at or about 0.1 to 20 mgs, 0.1 to 15 mgs, 0.1 to 10 mgs, 0.1 to 5 mgs, 0.2 to 20 mgs, 0.2 to 15 mgs, 0.2 to 10 mgs, 0.2 to 5 mgs, 0.4 to 20 mgs, 0.4 to 15 mgs, 0.4 to 10 mgs, 0.4 to 5 mgs, 0.4 to 4 mgs, 1 to 20 mgs, 1 to 15 mgs or 1 to 10 mgs. The corticosteroid can be administered orally.

[0096] Any of the methods as claimed herein can be redrafted as use claims. Any of the methods or uses provided herein further can include administration of an additional cancer treatment. In some examples, the cancer treatment is selected from among surgery, radiation, a chemotherapeutic agent, a biological agent, a polypeptide, an antibody, a peptide, a small molecule, a checkpoint inhibitor, a gene therapy vector, a virus and DNA. Any of the methods provided herein can be used to select and/or treat a subject who is a human. In other embodiments, any of the methods provided herein can be used to treat non-human subjects, such as dogs and other non-human mammals.

### BRIEF DESCRIPTION OF THE FIGURES

[0097] FIG. 1 depicts the effect of PEGPH20 (P) and/or nab-paclitaxel (NAB, N) on tumor growth in a mouse BxPC-3 PDA tumor xenograft model.

[0098] FIG. 2 depicts the effects of administering varying doses of gemcitabine (GEM) on tumor growth in a mouse BxPC-3 PDA tumor xenograft model.

[0099] FIG. 3 depicts the effect of PEGPH20 (P), gemcitabine (GEM, G) and/or nab-paclitaxel (NAB, N) on tumor growth in a mouse BxPC-3 PDA tumor xenograft model.

[0100] FIG. 4 depicts the median survival time of mice treated with PEGPH20 (P), gemcitabine (GEM, G) and/or nab-paclitaxel (NAB, N) in a mouse BxPC-3 PDA tumor xenograft model.

[0101] FIGS. 5A and 5B depict the levels of CA19-9 (FIG. 5A) and CEA biomarker (FIG. 5B) from serum of mice treated with PEGPH20 (P), gemcitabine (GEM, G) and/or nab-paclitaxel (NAB, N) in a mouse BxPC-3 PDA tumor xenograft model.

[0102] FIGS. 6A and 6B depict tumor growth inhibition of PEGPH20 and albumin-conjugated paclitaxel (Ab-pac) in a xenograft model. FIG. 6A depicts tumor growth inhibition in mice treated with vehicle, paclitaxel conjugated to albumin (Ab-pac), PEGPH20, or Ab-pac and PEGPH20 in the MDA-MB-468/HAS3 tumor model. FIG. 6B depicts tumor growth inhibition in mice treated with vehicle, paclitaxel conjugated to albumin (Ab-pac) at 1 mg/kg, Ab-pac at 3 mg/kg, Ab-pac at 1 mg/kg and PEGPH20, or Ab-pac at 10 mg/kg in the MDA-MB-468/HAS3 tumor model.

[0103] FIG. 7 depicts the randomization of subjects who were part of a Phase II clinical study and had previously untreated Stage IV pancreatic cancer, for treatment with either PAG (PEGPH20 combined with nab-paclitaxel and gemcitabine) or AG (nab-paclitaxel and gemcitabine), to compare the treatment effects of PAG versus AG.

[0104] FIGS. 8A and 8B depict the Kaplan-Meier (K-M) estimate of the Progression-Free Survival (PFS) of subjects receiving PAG versus those receiving AG. FIG. 8A depicts overall PFS for the Stage 1+Stage 2 subjects of the Phase II clinical trial. FIG. 8B depicts PFS for subjects with HA-high tumors in Stages 1 and 2.

[0105] FIGS. 9A and 9B depict the Kaplan-Meier (K-M) estimate of the Progression-Free Survival (PFS) of subjects with HA-high tumors based on study stage. FIG. 9A depicts PFS in HA-high subjects from Stage 1 receiving PAG versus those receiving AG. FIG. 9B depicts PFS in HA-high subjects from Stage 2 receiving PAG versus those receiving AG.

[0106] FIGS. 10A-10E depict the Kaplan-Meier (K-M) estimate of the Overall Survival (OS) of subjects receiving PAG versus those receiving AG. FIG. 10A depicts a comparison of OS between the PAG treatment arm and the AG treatment in the overall study population of the Phase II clinical trial. FIG. 10B depicts a comparison of OS between the PAG treatment arm and the AG treatment arm in subjects from the overall study population that had HA-high tumors. FIG. 10C depicts a comparison of OS between the PAG treatment arm and the AG treatment arm in subjects from the Stage 2 population that had HA-high tumors. FIG. 10D depicts a comparison of OS between the PAG treatment arm and the AG treatment arm in subjects from the Stage 1 population that had HA-high tumors. FIG. 10E depicts a comparison of OS between the PAG treatment arm and the AG treatment arm in the overall (ITT) Stage 2 population.

[0107] FIG. 11 depicts a study of the objective response rate (ORR) in 61 subjects with HA-high tumors from the Phase II clinical trial treated with either PAG or AG (37 in the PAG arm and 24 in the AG arm), as measured by reduction in target lesion size.

[0108] FIGS. 12A-12D depict a cutoff ratio of C3M/Pro-C3 for which Stage 2 subjects from the Phase II clinical trial have a median overall survival (OS) increase of ≥2.3 months when administered combination therapy that includes PEGPH20, when compared to the control group not administered PEGPH20. FIG. 12A depicts the fraction of subjects meeting the cutoff ratio threshold for the median overall survival (OS) increase of ≥2.3 months. FIG. 12B depicts the Likelihood Ratio test p-value at the cutoff ratio. FIG. 12C depicts the estimated Hazard Ratio (HR) at the cutoff ratio. FIG. 12D depicts the Likelihood Ratio median difference between the two trial arms (PAG and AG).

[0109] FIGS. 13A-13D depict a cutoff ratio of C3M/Pro-C3 for which Stage 1+Stage 2 subjects from the Phase II clinical trial have a median overall progression free survival (PFS) increase of ≥2.4 months when administered combination therapy that includes PEGPH20, when compared to the control group not administered PEGPH20. FIG. 13A depicts the fraction of subjects meeting the cutoff threshold ratio for the median progression free survival increase of ≥2.4 months. FIG. 13B depicts the Likelihood Ratio test p-value at the cutoff ratio. FIG. 13C depicts the estimated Hazard Ratio (HR) at the cutoff ratio. FIG. 13D depicts the Likelihood Ratio test median difference between the two trial arms (PAG and AG).

[0110] FIGS. 14A-14D depict predicted clinical benefits in PFS at the OS cutoff ratio shown in FIG. 12. The data used were from the Stage 1+Stage 2 subjects from the Phase II clinical trial. FIG. 14A depicts the fraction of subjects with potential (selected fraction likely to benefit) to be treated with PEGPH20 at the OS cutoff ratio, resulting in clinical benefits in PFS. FIG. 14B depicts the Likelihood Ratio test p-value at the cutoff ratio. FIG. 14C depicts the estimated Hazard Ratio (HR) at the cutoff ratio. FIG. 14D depicts the Likelihood Ratio test median difference between the two trial arms (PAG and AG).

[0111] FIGS. 15A-15D depict a cutoff ratio of C3M/Pro-C3 for which Stage 2 subjects from the Phase II clinical trial have a median overall survival (OS) increase of ≥2.3 months when administered combination therapy that includes PEGPH20, when compared to the control group not administered PEGPH20. FIG. 15A depicts the fraction of subjects meeting the cutoff ratio threshold for the median overall survival (OS) increase of ≥2.3 months. FIG. 15B depicts the Kaplan-Meier (KM) Log Rank p-value at the cutoff ratio. FIG. 15C depicts the estimated Hazard Ratio (HR) at the cutoff ratio. FIG. 15D depicts the Kaplan-Meier median difference between the two trial arms (PAG and AG).

[0112] FIGS. 16A-16D depict a cutoff ratio of C3M/Pro-C3 for which Stage 1+Stage 2 subjects from the Phase II clinical trial have a median overall progression free survival (PFS) increase of ≥2.4 months when administered combination therapy that includes PEGPH20, when compared to the control group not administered PEGPH20. FIG. 16A depicts the fraction of subjects meeting the cutoff threshold ratio for the median progression free survival increase of ≥2.4 months. FIG. 16B depicts the Kaplan-Meier Log Rank p-value at the cutoff ratio. FIG. 16C depicts the estimated Hazard Ratio (HR) at the cutoff ratio. FIG. 16D depicts the Kaplan-Meier median difference between the two trial arms (PAG and AG).

[0113] FIGS. 17A-17D depict predicted clinical benefits in PFS at the OS cutoff ratio shown in FIG. 15. The data used were from the Stage 1+Stage 2 subjects from the Phase II clinical trial. FIG. 17A depicts the fraction of subjects with potential to be treated with PEGPH20 at the OS cutoff ratio, resulting in clinical benefits in PFS. FIG. 17B depicts the Kaplan-Meier Log Rank p-value at the cutoff ratio. FIG. 17C depicts the estimated Hazard Ratio (HR) at the cutoff ratio. FIG. 17D depicts the Kaplan-Meier median difference between the two trial arms (PAG and AG).

### DETAILED DESCRIPTION

### Outline

[0114] A. Definitions
[0115] B. Extracellular Matrix (ECM) Remodeling in Hyaluronan-Associated Disorders
   [0116] 1. Hyaluronan (HA) Associated Diseases and Conditions
   [0117] 2. Extracellular Matrix (ECM) Overview
   [0118] 3. Liquid Biomarkers (Neo-Epitopes) of ECM Remodeling
   [0119] 4. Selection of Subjects for Treatment with an Anti-Hyaluronan Agent
      [0120] a. Detection and Quantitation of Biomarkers
      [0121] b. Classification of Subjects
      [0122] c. Determining the Cutoff Value of a Biomarker or a Ratio of Biomarkers
      [0123] d. Measurement of C3M/Pro-C3 Ratio
[0124] C. Anti-Hyaluronan Agent Therapies
   [0125] 1. Solid Tumors and Tumor Targeted Therapies
      [0126] a. Anti-Hyaluronan Agent
      [0127] b. Tumor-Targeted Taxane
   [0128] 2. Anti-Hyaluronan Agent and Tumor-Targeted Taxane Combination Therapy
[0129] D. Combination Therapy Agents
   [0130] 1. Anti-Hyaluronan Agents
      [0131] a. Agents that Inhibit Hyaluronan Synthesis
      [0132] b. Hyaluronan-Degrading Enzymes and Polymer-Conjugated Hyaluronan-Degrading Enzymes
         [0133] i. Hyaluronidases
         (a) Mammalian-type hyaluronidases PH20
         (b) Bacterial Hyaluronidase
         (c) Hyaluronidases from leeches, other parasites and crustaceans
         [0134] ii. Other hyaluronan degrading enzymes
         [0135] iii. Soluble hyaluronan degrading enzymes
         (a) Soluble Human PH20
         (b) rHuPH20
         [0136] iv. Glycosylation of hyaluronan degrading enzymes
         [0137] v. Modified (Polymer-Conjugated) Hyaluronan Degrading Enzymes
         PEGylated Soluble hyaluronan degrading enzymes
         Other modifications
   [0138] 2. Taxanes and Formulations thereof
      [0139] a. Taxanes
      [0140] b. Tumor- or Stromal-Targeted Taxanes
         [0141] Albumin-Bound Taxane
   [0142] 3. Further Chemotherapeutic Agent (e.g. Nucleoside Analogs)
      [0143] 1. Exemplary Nucleoside Analogs
         [0144] i. Gemcitabine
         [0145] ii. Cytarabine
         [0146] iii. Decitabine
         [0147] iv. Azacytidine
      [0148] 2. Other exemplary anti-cancer agents
[0149] E. Methods of Producing Nucleic Acids and Encoded Polypeptides of
   [0150] Hyaluronan Degrading Enzymes
   [0151] 1. Vectors and Cells
   [0152] 2. Expression
      [0153] a. Prokaryotic Cells
      [0154] b. Yeast Cells
      [0155] c. Insect Cells
      [0156] d. Mammalian cells
      [0157] e. Plants
   [0158] 3. Purification Techniques
   [0159] 4. PEGylation of Hyaluronan Degrading Enzyme Polypeptides
[0160] F. Combinations, Pharmaceutical Compositions and Formulations
   [0161] 1. Combinations
   [0162] 2. Formulations
   [0163] 3. Pharmaceutical Compositions
      [0164] a. Injectables, solutions and emulsions
      [0165] b. Lyophilized powders
      [0166] c. Topical administration
      [0167] d. Compositions for other routes of administration
   [0168] 4. Formulation Amounts
   [0169] 5. Packaging and Articles of Manufacture
[0170] G. Methods of Assessing Activity, Bioavailability and Pharmacokinetics
   [0171] 1. In Vitro Assays
      [0172] a. Hyaluronidase Activity of a Hyaluronan Degrading Enzyme
      [0173] b. Taxane Activity
      [0174] c. Anticancer Activity
   [0175] 2. In Vivo Animal Models
   [0176] 3. Pharmacokinetics and tolerability
[0177] H. Methods and Uses of Combination Therapy
   [0178] 1. Cancers
   [0179] 2. Dosage and Administration
   [0180] 3. Dosage Regimen: Frequency and Cycle of Administration
   [0181] 4. Additional Combination Therapies
      [0182] a. Corticosteroids
      [0183] b. Anti-Cancer Agents and Other Treatments
[0184] I. Examples

### A. Definitions

[0185] Unless defined otherwise, all technical and scientific terms used herein have the same meaning as is commonly understood by one of skill in the art to which the invention(s) belong. All patents, patent applications, published applications and publications, Genbank sequences, databases, websites and other published materials referred to throughout the entire disclosure herein, unless noted otherwise, are incorporated by reference in their entirety. In the event that there are a plurality of definitions for terms herein, those in this section prevail. Where reference is made to a URL or other such identifier or address, it understood that such identifiers can change and particular information on the internet can come and go, but equivalent information can be found by searching the internet. Reference thereto evidences the availability and public dissemination of such information.

[0186] As used herein, the terms “marker” and “biomarker” are used interchangeably herein and generally refer to a measurable substance in a tissue or body fluid that is identified to be indicative of, for example, a disease, such as cancer, and/or a treatment regimen that will benefit a subset of subjects having the disease. In the methods provided herein, biomarkers, levels thereof and ratios thereof that are representative of imbalances in turnover/organization of the extracellular matrix (ECM) are found herein to be predictive or indicative of subjects for whom treatment that includes a soluble hyaluronidase will be or is beneficial. Such biomarkers, for example, C3M and Pro-C3, are present in body fluids such as blood, plasma, serum, cerebral spinal fluid, and urine.

[0187] In certain contexts, evident to one of skill in the art, the term “marker” as used herein refers to a selectable gene or protein that is introduced into expression systems (cells, vectors, e.g.) for generating proteins of interest (soluble hyaluronidases, e.g.). The selectable gene or protein serves as a marker that permits the selection of cells or vectors that express a protein of interest.

[0188] As used herein, “PFS” refers to progression-free survival and is measured as the time from when the subject is selected for a treatment regimen, e.g., a regimen that either includes an anti-hyaluronan agent such as PEGPH20 or does not include an anti-hyaluronan agent, until the time of disease progression or death.

[0189] As used herein, ORR refers to the overall or objective response rate, which is a measure of the rate of response of the tumor to therapy as determined by the proportion of patients with tumor size reduction of a predefined amount for a predefined minimum time period. The predefined minimum time period is the Duration of Response (DoR) measured from the time of the initial response (observed tumor reduction) until the time of documented tumor progression.

[0190] As used herein, “OS” refers to overall survival, measured as the time from when the subject is selected for a treatment regimen, e.g., a regimen that either includes an anti-hyaluronan agent such as PEGPH20 or does not include an anti-hyaluronan agent, until the time of death from any cause.

[0191] As used herein, “cutoff ratio” refers to a threshold ratio of the level of a first biomarker in a subject to the level of a second biomarker in the same subject that determines whether the subject is selected for a particular treatment regimen. For example, in the methods provided herein, subjects who will benefit from a treatment regimen that includes an anti-hyaluronan agent are selected based on whether or not the ratio of the level of a first biomarker associated with Type III collagen degradation to the level of a second biomarker associated with Type III collagen formation is at or above a threshold cutoff ratio, or below the cutoff ratio.

[0192] As used herein, the “percentile” value of a parameter, such as a ratio of two biomarkers, is in reference to a study of that parameter in a group of subjects. The percentile value of a parameter indicates what percentage of the subjects in the group have a value of that parameter that is below the percentile value. For example, if the “25th percentile” value of the ratio of the level of a first biomarker associated with Type III collagen degradation to the level of a second biomarker associated with Type III collagen formation is X, it means that 25% of the subjects in whom the ratio was measured have a value that is less than X and 75% of the subjects in whom the ratio was measured have a value that is equal to or greater than X.

[0193] In examples of the methods provided herein, the cutoff ratio of the level of a first biomarker associated with Type III collagen degradation to the level of a second marker associated with Type III collagen formation is based on the 50th percentile value of the ratio in a group of subjects (50% of the subjects have a value less than the ratio and the remaining 50% have a ratio that is equal to or greater than the 50th percentile value). The terms “50th percentile” and “median (50th percentile)” in reference to a cutoff ratio are used interchangeably herein. In other examples of the methods provided herein, the cutoff ratio of the level of a first marker associated with Type III collagen degradation to the level of a second marker associated with Type III collagen formation is based on the 75th percentile value of the ratio in a group of subjects (75% of the subjects have a value less than the ratio and the remaining 25% have a ratio that is equal to or greater than the 75th percentile value). It is understood that other percentiles values could have been selected.

[0194] As used herein, “median” refers to an example of a cutoff ratio value that is obtained based on measuring the ratio in each member of a group of subjects and determining the value at which half the subjects have a ratio that is higher than the value and half the subjects have a ratio that is lower than the value. This value at which half the subjects have a ratio that is higher than the value and half the subjects have a ratio that is lower than the value is termed the median. The median value is distinguished from the median (50th percentile) value, which is based on the percent spread of the value for a parameter (e.g., ratio) in a group of subjects.

[0195] As used herein, “subject” and “patient” are used interchangeably in instances in which the subject is a human patient. Subject refers to a candidate, for example a candidate with cancer, evaluated for whether a benefit will be realized from a treatment regimen that includes an anti-hyaluronan agent, compared to a treatment regimen that does not include an anti-hyaluronan agent. The term “subject” can refer to an animal, including a mammal, such as a human being. Reference herein to a “patient” means a human subject exhibiting symptoms of a disease or disorder.

[0196] As used herein, reference to a subject selected as one who will “benefit” from a certain treatment regimen, or for whom the treatment is “beneficial,” such as a treatment regimen that includes an anti-hyaluronan agent, such as a polymer-conjugated soluble hyaluronidase, such as PEGPH20, means that the subject has (or is predicted to have) an increased survival outcome when treated with an anti-hyaluronan agent, such as a polymer-conjugated soluble hyaluronidase, compared to treatment without the anti-hyaluronan agent. The increased survival outcome can be, for example, increased PFS, increased ORR or increased OS.

[0197] As used herein, subjects with a potential to be treated or potential for clinical benefit, refers to subjects selected for treatment as described herein among whom a predicted fraction, depending on the percentile value and cutoff level, will be responsive to treatment.

[0198] As used herein a “neo-epitope” is an epitope recognized by an antibody or an antigen-binding fragment thereof, where the epitope is present in a fragment of a polypeptide but is not present in the full-length polypeptide or in a longer polypeptide fragment. This occurs because the neo-epitope is hidden or not present by virtue of the different conformation of the longer polypeptide. In some examples, the longer polypeptide fragment in which the neo-epitope is not present is longer than the fragment containing the neo-epitope by 1, 2, 3, 4, 5, 6, 7, 8, 9 or 10 more amino acids. In one example, the longer polypeptide fragment in which the neo-epitope is not present is longer than the fragment containing the neo-epitope by 1 amino acid. This occurs because the neo-epitope is hidden or not present by virtue of the different conformation of the longer polypeptide. In some examples, the neo-epitope also cannot be present in a shorter polypeptide fragment, i.e., the shorter fragment no longer contains the epitope recognized by the antibody.

[0199] As used herein, “C3M” is a polypeptide fragment that contains a neo-epitope and is formed by degradation of Type III collagen by matrix metalloprotease(s), such as, for example, MMP-2 and/or MMP-9. For example, the C3M containing the neo-epitope can be generated by cleavage at amino acid position 610 of Type III collagen. Thus, in some examples, the neo-epitope of C3M is an amino acid sequence that includes KNGETGPQGP (SEQ ID NO:226) or that is KNGETGPQGP (SEQ ID NO:226), which is the sequence corresponding to amino acids 610-619 of Type III collagen (SEQ ID NO:227).

[0200] As used herein, “Pro-C3” refers to a fragment containing a neo-epitope, where the fragment is produced during the formation of Type III collagen. Examples of Pro-C3 include a fragment containing a neo-epitope of the released N-terminal pro-peptide of Type III collagen. For example, the C-terminal amino acid sequence CPTGPQNYSP (SEQ ID NO:216) in human Type III collagen is formed by N-protease cleavage of human Type III collagen from intact procollagen Type III at the Pro-Gln bond between amino acids P153-Q154 in human Type III collagen. In some examples, Pro-C3 neo-epitope markers for use in the compositions and methods described herein can have the sequence PTGPQNYSP (SEQ ID NO:229).

[0201] As used herein, “Pro-C6” refers to a peptide biomarker that is the C-terminal fragment of the released C5 domain of Type VI collagen alpha3 chain (endotrophin). An exemplary Pro-C6 neo-epitope sequence is KPGVISVMGT (SEQ ID NO:238). As used herein, “VCANM” is a matrix metalloproteinase-generated neo-epitope fragment of versican associated with a high turnover rate of versican. For example, the neo-epitope can be generated by MMP degradation, such as, for example, degradation by MMP-8 or MMP-12. An exemplary VCANM neo-epitope containing sequence is KTFGKMKPRY (SEQ ID NO:239).

[0202] As used herein, “C8-C” refers to a C-terminal fragment of Type VIII collagen (vastatin). An exemplary C8-C neo-epitope containing sequence is SFSGYLLYPM (SEQ ID NO:240).

[0203] As used herein, a polypeptide fragment containing a neo-epitope refers to a portion of a full-length protein that contains an epitope that is not present in the full-length polypeptide or a longer version of the polypeptide. Hence biomarkers that are fragments of polypeptides, such as those described herein, contain neo-epitopes by which they can be identified.

[0204] An antibody that specifically binds to a polypeptide fragment containing a neo-epitope does not bind to or binds with substantially less affinity, at least 10-fold, to the full length protein. Such antibodies, thus, can be used to detect, such as by immunoassay, the presence of the polypeptide fragment in a sample.

[0205] As used herein, a “capture agent” or “capture reagent” refers to a molecule that is capable of binding specifically to a biomarker.

[0206] As used herein, “combination therapy” refers to a treatment in which a subject is given two or more therapeutic agents, such as at least two or at least three therapeutic agents, for treating a single disease. For purposes herein, combination therapy includes therapy with a polymer-conjugated soluble hyaluronidase and a second anti-cancer agent, such as but not limited to, a tumor-targeted taxane.

[0207] As used herein, “antibody” refers to immunoglobulins and immunoglobulin fragments, whether natural or partially or wholly synthetically, such as recombinantly, produced, including any fragment thereof containing at least a portion of the variable heavy chain and light chain region of the immunoglobulin molecule that is sufficient to form an antigen binding site and, when assembled, to specifically bind antigen (also referred to herein as antigen-binding fragment thereof). Hence, an antibody includes any protein having a binding domain that is homologous or substantially homologous to an immunoglobulin antigen-binding domain (antibody combining site). For example, an antibody refers to an antibody that contains two heavy chains (which can be denoted H and H′) and two light chains (which can be denoted L and L′), where each heavy chain can be a full-length immunoglobulin heavy chain or a portion thereof sufficient to form an antigen binding site (e.g., heavy chains include, but are not limited to, V_{H} chains, V_{H}-C_{H}1 chains and V_{H}-C_{H}1-C_{H}2-C_{H}3 chains), and each light chain can be a full-length light chain or a portion thereof sufficient to form an antigen binding site (e.g., light chains include, but are not limited to, V_{L} chains and V_{L}-C_{L} chains). Each heavy chain (H and H′) pairs with one light chain (L and L′, respectively). Typically, antibodies minimally include all or at least a portion of the variable heavy (V_{H}) chain and/or the variable light (V_{L}) chain. The antibody also can include all or a portion of the constant region.

[0208] For purposes herein, recitation of antibody includes full-length antibodies and portions thereof including antibody fragments. Antibody fragments, include, but are not limited to, Fab fragments, Fab′ fragments, F(ab′)2 fragments, Fv fragments, disulfide-linked Fvs (dsFv), Fd fragments, Fd′ fragments, single-chain Fvs (scFv), single-chain Fabs (scFab), diabodies, anti-idiotypic (anti-Id) antibodies, or antigen-binding fragments of any of the above. Antibody also includes synthetic antibodies, recombinantly produced antibodies, multispecific antibodies (e.g., bispecific antibodies), human antibodies, non-human antibodies, humanized antibodies, chimeric antibodies, and intrabodies. Antibodies provided herein include members of any immunoglobulin type (e.g., IgG, IgM, IgD, IgE, IgA and IgY), any class (e.g., IgG1, IgG2, IgG3, IgG4, IgA1 and IgA2) or subclass (e.g., IgG2a and IgG2b).

[0209] As used herein, a “form” of an antibody refers to a particular structure of an antibody. Antibodies herein include full length antibodies and portions thereof, such as, for example, an Fab fragment or other antibody fragment. Thus, an Fab is a particular form of an antibody.

[0210] As used herein, reference to a “corresponding form” of an antibody means that when comparing a property or activity of two antibodies, the property is compared using the same form of the antibody. For example, if it is stated that an antibody has less activity compared to the activity of the corresponding form of a first antibody, that means that a particular form, such as an Fab of that antibody, has less activity compared to the Fab form of the first antibody.

[0211] As used herein, a “full-length” antibody is an antibody having two full-length heavy chains (e.g., V_{H}-C_{H}1-C_{H}2-C_{H}3 or V_{H}-C_{H}1-C_{H}2-C_{H}3-C_{H}4) and two full-length light chains (V_{L}-C_{L}) and hinge regions, such as human antibodies produced by antibody secreting B cells and antibodies with the same domains that are produced synthetically.

[0212] As used herein, antibody fragment or antibody portion refers to any portion of a full-length antibody that is less than full length but contains at least a portion of the variable region of the antibody sufficient to form an antigen binding site (e.g., one or more CDRs) and thus retains the binding specificity and/or an activity of the full-length antibody; antibody fragments include antibody derivatives produced by enzymatic treatment of full-length antibodies, as well as synthetically, e.g., recombinantly produced derivatives. Examples of antibody fragments include, but are not limited to, Fab, Fab′, F(ab)₂, single-chain Fvs (scFv), Fv, dsFv, diabody, Fd and Fd fragments (see, for example, Methods in Molecular Biology, Vol 207: Recombinant Antibodies for Cancer Therapy Methods and Protocols (2003); Chapter 1; p 3-25, Kipriyanov). The fragment can include multiple chains linked together, such as by disulfide bridges and/or by peptide linkers. An antibody fragment generally contains at least about 50 amino acids and typically at least 200 amino acids.

[0213] As used herein, an anti-immune checkpoint protein antibody, refers to any antibody that specifically binds to an immune checkpoint protein or a soluble fragment thereof and blocks its activity or inhibits or reduces its activity. An anti-immune checkpoint protein antibody typically binds an immune checkpoint ligand protein or an immune checkpoint receptor protein and blocks the binding of a receptor to the target immune checkpoint ligand protein or a ligand to the target immune checkpoint receptor protein, thereby preventing the inhibitory signal transduction that suppresses an immune response. Hence, anti-immune checkpoint protein antibodies are immune checkpoint inhibitors. Reference to anti-immune checkpoint protein antibodies herein include full-length antibodies and antigen-binding fragments thereof that specifically bind to an immune checkpoint ligand or receptor protein. Exemplary anti-immune checkpoint protein antibodies include, but are not limited to, anti-cytotoxic T-lymphocyte-associated protein 4 (CTLA4) antibodies and anti-programmed cell death protein 1 (PD-1) antibodies.

[0214] As used herein, an Fv antibody fragment is composed of one variable heavy domain (V_{H}) and one variable light (V_{L}) domain linked by noncovalent interactions.

[0215] As used herein, a dsFv refers to an Fv with an engineered intermolecular disulfide bond, which stabilizes the V_{H}-V_{L} pair.

[0216] As used herein, an Fd fragment is a fragment of an antibody containing a variable domain (V_{H}) and one constant region domain (C_{H}1) of an antibody heavy chain.

[0217] As used herein, a Fab fragment is an antibody fragment that results from digestion of a full-length immunoglobulin with papain, or a fragment having the same structure that is produced synthetically, e.g., by recombinant methods. A Fab fragment contains a light chain (containing a V_{L} and C_{L}) and another chain containing a variable domain of a heavy chain (V_{H}) and one constant region domain of the heavy chain (C_{H}1).

[0218] As used herein, a F(ab′)2 fragment is an antibody fragment that results from digestion of an immunoglobulin with pepsin at pH 4.0-4.5, or a fragment having the same structure that is produced synthetically, e.g., by recombinant methods. The F(ab′)₂ fragment essentially contains two Fab fragments where each heavy chain portion contains an additional few amino acids, including cysteine residues that form disulfide linkages joining the two fragments.

[0219] As used herein, a Fab′ fragment is a fragment containing one half (one heavy chain and one light chain) of the F(ab′)₂ fragment.

[0220] As used herein, an Fd′ fragment is a fragment of an antibody containing one heavy chain portion of a F(ab′)₂ fragment.

[0221] As used herein, an Fv′ fragment is a fragment containing only the V_{H} and V_{L} domains of an antibody molecule.

[0222] As used herein, hsFv refers to antibody fragments in which the constant domains normally present in a Fab fragment have been substituted with a heterodimeric coiled-coil domain (see, e.g., Arndt et al. (2001) J Mol Biol. 7:312:221-228).

[0223] As used herein, an scFv fragment refers to an antibody fragment that contains a variable light chain (V_{L}) and variable heavy chain (V_{H}), covalently connected by a polypeptide linker in any order. The linker is of a length such that the two variable domains are bridged without substantial interference. Exemplary linkers are (Gly-Ser)ₙ residues with some Glu or Lys residues dispersed throughout to increase solubility.

[0224] As used herein, diabodies are dimeric scFv; diabodies typically have shorter peptide linkers than scFvs, and preferentially dimerize.

[0225] As used herein, a polypeptide “domain” is a part of a polypeptide (a sequence of three or more, generally 5, 10 or more amino acids) that is structurally and/or functionally distinguishable or definable. An exemplary polypeptide domain is a part of the polypeptide that can form an independently folded structure within a polypeptide made up of one or more structural motifs (e.g., combinations of alpha helices and/or beta strands connected by loop regions) and/or that is recognized by a particular functional activity, such as enzymatic activity, dimerization or antigen-binding. A polypeptide can have one or more, typically more than one, distinct domains. For example, the polypeptide can have one or more structural domains and one or more functional domains. A single polypeptide domain can be distinguished based on structure and function. A domain can encompass a contiguous linear sequence of amino acids. Alternatively, a domain can encompass a plurality of non-contiguous amino acid portions, which are non-contiguous along the linear sequence of amino acids of the polypeptide. Typically, a polypeptide contains a plurality of domains. For example, each heavy chain and each light chain of an antibody molecule contains a plurality of immunoglobulin (Ig) domains, each about 110 amino acids in length. Those of skill in the art are familiar with polypeptide domains and can identify them by virtue of structural and/or functional homology with other such domains. For exemplification herein, definitions are provided, but it is understood that it is well within the skill in the art to recognize particular domains by name. If needed, appropriate software can be employed to identify domains.

[0226] As used herein, a variable domain with reference to an antibody is a specific Ig domain of an antibody heavy or light chain that contains a sequence of amino acids that varies among different antibodies. Each light chain and each heavy chain has one variable region domain (V_{L} and V_{H}). The variable domains provide antigen specificity, and thus are responsible for antigen recognition. Each variable region contains CDRs that are part of the antigen binding site domain and framework regions (FRs).

[0227] As used herein, “hypervariable region,” “HV,” “complementarity-determining region,” “CDR” and “antibody CDR” are used interchangeably to refer to one of a plurality of portions within each variable region that together form an antigen binding site of an antibody. Each variable region domain contains three CDRs, named CDR1, CDR2, and CDR3. The three CDRs are non-contiguous along the linear amino acid sequence, but are proximate in the folded polypeptide. The CDRs are located within the loops that join the parallel strands of the beta sheets of the variable domain. As used herein, “antigen-binding domain,” “antigen-binding site,” “antigen combining site” and “antibody combining site” are used synonymously to refer to a domain within an antibody that recognizes and physically interacts with cognate antigen. A native conventional full-length antibody molecule has two conventional antigen-binding sites, each containing portions of a heavy chain variable region and portions of a light chain variable region. A conventional antigen-binding site contains the loops that connect the anti-parallel beta strands within the variable region domains. The antigen combining sites can contain other portions of the variable region domains. Each conventional antigen-binding site contains three hypervariable regions from the heavy chain and three hypervariable regions from the light chain. The hypervariable regions also are called complementarity-determining regions (CDRs).

[0228] As used herein, “portion thereof” with reference to an antibody heavy or light chain or variable heavy or light chain refers to a contiguous portion thereof that is sufficient to form an antigen binding site such that, when assembled into an antibody containing a heavy and light chain, it contains at least 1 or 2, typically 3, 4, 5 or all 6 CDRs of the variable heavy (V_{H}) and variable light (V_{L}) chains sufficient to retain at least a portion of the binding specificity of the corresponding full-length antibody containing all 6 CDRs. Generally, a sufficient antigen binding site requires CDR3 of the heavy chain (CDR_{H}3). It typically further requires the CDR3 of the light chain (CDR_{L}3). As described herein, one of skill in the art knows and can identify the CDRs based on Kabat or Chothia numbering (see e.g., Kabat, E. A. et al. (1991) Sequences of Proteins of Immunological Interest, Fifth Edition, U.S. Department of Health and Human Services, NIH Publication No. 91-3242, and Chothia, C. et al. (1987) J Mol. Biol. 196:901-917).

[0229] As used herein, “framework regions” (FRs) are the domains within the antibody variable region domains that are located within the beta sheets; the FR regions are comparatively more conserved, in terms of their amino acid sequences, than the hypervariable regions.

[0230] As used herein, a “constant region” domain is a domain in an antibody heavy or light chain that contains a sequence of amino acids that is comparatively more conserved among antibodies than the variable region domain. Each light chain has a single light chain constant region (C_{L}) domain and each heavy chain contains one or more heavy chain constant region (C_{H}) domains, which include, C_{H}1, C_{H}2, C_{H}3 and C_{H}4. Full-length IgA, IgD and IgG isotypes contain C_{H}1, C_{H}2, C_{H}3 and a hinge region, while IgE and IgM contain C_{H}1, C_{H}2, C_{H}3 and C_{H}4. C_{H}1 and C_{L} domains extend the Fab arm of the antibody molecule, thus contributing to the interaction with antigen and rotation of the antibody arms. Antibody constant regions can serve effector functions, such as, but not limited to, clearance of antigens, pathogens and toxins to which the antibody specifically binds, e.g., through interactions with various cells, biomolecules and tissues.

[0231] As used herein, the phrase “derived from” or “derivative” when referring to antibody fragments derived from another antibody, such as a monoclonal antibody, refers to the engineering of antibody fragments (e.g., Fab, F(ab′), F(ab′)₂, single-chain Fv (scFv), Fv, dsFv, diabody, Fd and Fd′ fragments) that retain the binding specificity of the original or parent antibody. Such fragments can be derived by a variety of methods known in the art, including, but not limited to, enzymatic cleavage, chemical crosslinking, recombinant means or combinations thereof. Generally, the derived antibody fragment shares the identical or substantially identical heavy chain variable region (V_{H}) and light chain variable region (V_{L}) of the parent antibody, such that the antibody fragment and the parent antibody bind the same epitope.

[0232] As used herein, a “parent antibody” or “source antibody” refers to an antibody from which an antibody fragment (e.g., Fab, F(ab′), F(ab)₂, single-chain Fv (scFv), Fv, dsFv, diabody, Fd and Fd′ fragments) is derived.

[0233] As used herein, a multimerization domain refers to a sequence of amino acids that promotes stable interaction of a polypeptide molecule with one or more additional polypeptide molecules, each containing a complementary multimerization domain, which can be the same or a different multimerization domain to form a stable multimer with the first domain. Generally, a polypeptide is joined directly or indirectly to the multimerization domain. Exemplary multimerization domains include the immunoglobulin sequences or portions thereof, leucine zippers, hydrophobic regions, hydrophilic regions, and compatible protein-protein interaction domains. The multimerization domain, for example, can be an immunoglobulin constant region or domain, such as, for example, the Fc domain or portions thereof from IgG including IgG1, IgG2, IgG3 or IgG4 subtypes, IgA, IgE, IgD and IgM and modified forms thereof.

[0234] As used herein, dimerization domains are multimerization domains that facilitate interaction between two polypeptide sequences (such as, but not limited to, antibody chains). Dimerization domains include, but are not limited to, an amino acid sequence containing a cysteine residue that facilitates formation of a disulfide bond between two polypeptide sequences, such as all or part of a full-length antibody hinge region, or one or more dimerization sequences, which are sequences of amino acids known to promote interaction between polypeptides (e.g., leucine zippers, GCN4 zippers).

[0235] As used herein, “Fc” or “Fc region” or “Fc domain” refers to a polypeptide containing the constant region of an antibody heavy chain, excluding the first constant region immunoglobulin domain. Thus, Fc refers to the last two constant region immunoglobulin domains of IgA, IgD, and IgE, or the last three constant region immunoglobulin domains of IgE and IgM. Optionally, an Fc domain can include all or part of the flexible hinge N-terminal to these domains. For IgA and IgM, Fc can include the J chain. For an exemplary Fc domain of IgG Fc contains immunoglobulin domains Cy2 and Cy3, and optionally, all or part of the hinge between Cy1 and Cy2. The boundaries of the Fc region can vary, but typically, include at least part of the hinge region. In addition, Fc also includes any allelic or species variant or any variant or modified form, such as any variant or modified form that alters the binding to an FcR or alters an Fc-mediated effector function.

[0236] As used herein, “Fc chimera” refers to a chimeric polypeptide in which one or more polypeptides is linked, directly or indirectly, to an Fc region or a derivative thereof. Typically, an Fc chimera combines the Fc region of an immunoglobulin with another polypeptide. Derivatives of or modified Fc polypeptides are known to those of skill in the art.

[0237] As used herein, a “monoclonal antibody” refers to an antibody secreted by a transfected or cloned cell such as a hybridoma clone. Each such hybridoma clone is derived from a single B cell and, therefore, all of the antibody molecules are identical. Monoclonal antibodies can be prepared using standard methods known to those with skill in the art (see, e.g., Kohler et al., Nature 256:495-497 (1975), Kohler et al., Eur. J. Immunol. 6:511-519 (1976) and WO 02/46455). For example, an animal is immunized by standard methods to produce antibody-secreting somatic cells. These cells then are removed from the immunized animal for fusion to myeloma cells.

[0238] Somatic cells that can produce antibodies, particularly B cells, can be used for fusion with a myeloma cell line. These somatic cells can be derived from the lymph nodes, spleens and peripheral blood of primed animals. Specialized myeloma cell lines have been developed from lymphocytic tumors for use in hybridoma-producing fusion procedures (Kohler and Milstein, Eur. J. Immunol. 6:511-519 (1976); Shulman et al., Nature, 276:269-270 (1978); Volk et al., J. Virol., 42:220-227 (1982)). These cell lines have three useful properties. The first is they facilitate the selection of fused hybridomas from unfused and similarly indefinitely self-propagating myeloma cells by having enzyme deficiencies that render them incapable of growing in selective medium that support the growth of hybridomas. The second is they have the ability to produce antibodies and are incapable of producing endogenous light or heavy immunoglobulin chains. A third property is they efficiently fuse with other cells. Other methods for producing hybridomas and monoclonal antibodies are well known to those of skill in the art.

[0239] As used herein, an “immunoassay” is defined as any method using a specific or preferential binding of an antigen with a second material (i.e., a binding partner, usually an antibody, antibody fragment or another substance having an antigen binding site) that specifically or preferentially binds to an epitope of the antigen. The immunoassay methods provided herein include any known to those of skill in the art, including, but not limited to, sandwich or competition assays, including ELISA, radioimmunoassay, agglutination, or precipitation assays.

[0240] As used herein, “humanized” antibodies refer to antibodies that are modified to include “human” sequences of amino acids so that administration to a human does not provoke an immune response. Methods for preparation of such antibodies are known. For example, a hybridoma that expresses a monoclonal antibody is altered by recombinant DNA techniques to express an antibody in which the amino acid composition of the non-variable regions is based on human antibodies. Computer programs that identify such regions are known in the art.

[0241] As used herein, “selective binding” of a binding partner, such as an antibody or antigen-binding fragment thereof, to a particular molecule, such as an antigen or neo-epitope, binds with at least about 2-fold and typically at least about 5-fold, 10-fold, 50-fold, 100-fold, or more, greater affinity (Kₐ or K_{eq}) than for another molecule, or at least 2-fold and typically at least 5-fold, 10-fold, 50-fold, 100-fold, or more, greater affinity (Kₐ or K_{eq}) than for another molecule. Typical conditions for detecting and determining binding affinity constants or for determining the selectivity of binding include physiological conditions, such as PBS (137 mM NaCl, 2.7 mM KCl, 10 mM phosphate buffer pH 7.4).

[0242] As used herein, “specific binding” refers to binding partners that bind with an a binding affinity Kₐ of typically at least about 10⁷ l/mol, 10⁸ l/mol or more. Generally, it refers to binding partners that selectively and specifically bind. For purposes herein, the antibodies are raised against a neo-epitope, and specifically and selectively bind to the polypeptide that contains the neo-epitope compared to a longer polypeptide or shorter polypeptide that does not contain the neo-epitope because it is hidden or not present by virtue of the different conformation.

[0243] As used herein, “combination therapy” refers to a treatment in which a subject if given two or more therapeutic agents, such as at least two or at least three therapeutic agents, for treating a single disease. For purposes herein, combination therapy includes therapy with a polymer-conjugated hyaluronan degrading enzyme and a tumor-targeted taxane and optionally a further anti-cancer agent or chemotherapeutic agent such as a nucleoside analog.

[0244] As used herein, a “taxane” refers to a family of antimitotic or antimicrotubule agents that inhibit cell growth by stopping mitosis and cell division due to interference with microtubule polymerization. Taxanes include naturally produced diterpenes produced from the plants of the genus Taxus (yews). Taxanes also include taxanes that are produced synthetically that exhibit antimitotic or antimicrotubule activity. Typically, taxanes share a common core structure containing four rings (six membered A and C rings, eight membered B ring and four membered D ring). Exemplary of a taxane is paclitaxel, or a derivative or analog thereof.

[0245] As used herein, “antimitotic activity” refers to inhibiting, reducing or preventing mitosis. By virtue of such activity, cell growth is inhibited, reduced or prevented. For example, an agent exhibits antimitotic activity if cell growth is inhibited by at least or about at least or 20%, 30%, 40%, 50%, 60%, 70%, 80%, 90% or more compared to cell growth in the absence of the agent.

[0246] As used herein, “antimicrotubule activity” refers to the activity of any agent that interferes with microtubules, such as by decreasing, reducing or preventing microtubule polymerization. Hence, antimicrotubule activity can refer to any activity that stabilizes microtubules, which are naturally unstable and that undergo dynamic depolymerization (shortening) and polymerization (lengthening) processes. For example, antimicrotubule activity is affected by agents, such as taxanes, that interact with the ends of microtubules, thereby freezing or preventing disassembly or assembly. Assays to assess microtubule polymerization are known in the art, and exemplary assays described herein. Antimicrotubule activity exists if an agent inhibits microtubule polymerization by at least or about at least or 20%, 30%, 40%, 50%, 60%, 70%, 80%, 90% or more compared to polymerization in the absence of the agent.

[0247] As used herein, a “tumor-targeted taxane” refers to taxane that is linked, directly or indirectly, to a moiety and that exhibits increased specificity with one or more molecules on the surface of a tumor compared to the taxane that is not linked to the tumor moiety. For example, the moiety can be a macromolecule, peptide, protein, antibody (e.g. monoclonal antibody) or lipid that interacts or binds (e.g. specifically binds) with a molecule present on the surface of a tumor such as a sugar, lipid, glycosaminoglycan or protein present on the tumor surface. Generally, the molecule that is present on the surface of the tumor is present at a level or to an extent that is aberrant or distinct from non-tumor tissues or normal tissues or cells.

[0248] As used herein, the phrase “sufficient to achieve intratumoral delivery” means that the taxane exhibits increased or greater targeting to a tumor cell than to a non-tumor cell, and thus exhibits increased or greater intracellular localization therein. Assays to assess intratumoral delivery can include in vitro or in vivo assays, such as binding assay or subcellular localization assays whereby the bound- or intracellular level or amount of a drug, such as a taxane, is compared between normal cells and tumor cells. Such assays include, but are not limited to, immunoassays, including radioimmunoassays or ELISAs (e.g. lysate-based ELISAs and infrared ELISAs; see also Svojanovsky et al. (1999) Journal of Pharmaceutical and Biomedical Analysis, 20:549-555); tubulin-based bioassay (see e.g. Suye et al. (1997) Anal. Chem., 69:3633-3635); histochemistry or immunohistochemistry (Hong et al. (2007) Mol. Cancer. Ther., 6: 3239-47); HPLC; fluorescent-based assays, including flow cytometry and other methods (see e.g. Sheikh et al. (2001) Biosensors & Bioelectronics, 16:647-652), and other similar assays known to one of skill in the art. Antibodies to taxanes for use in such methods are available (see e.g. Grothaus et al. (1995) J Nat. Prod., 58:1003-14; Leu et al. (1993) Cancer Res., 53:1388-1391; Catalog No. ab26953, Abcam). Biosensor technology also can be used (see e.g. Braunhut et al. (2005) Assay and Drug Dev. Tech., 3: 77-88). Assays also can include indirect assays, whereby the activity of the taxane on cellular machinery is assessed, including effects on tumor cell apoptosis and tumor growth, including tumor size or volume.

[0249] As used herein, an “anti-hyaluronan agent” refers to any agent that modulates hyaluronan (HA) synthesis or degradation, thereby altering hyaluronan levels in a tissue or cell. For purposes herein, anti-hyaluronan agents reduce hyaluronan levels in a tissue or cell compared to the absence of the agent. Such agents include compounds that modulate the expression of genetic material encoding HA synthase (HAS) and other enzymes or receptors involved in hyaluronan metabolism, or that modulate the proteins that synthesize or degrade hyaluronan including HAS function or activity. The agents include small-molecules, nucleic acids, peptides, proteins or other compounds. For example, anti-hyaluronan agents include, but are not limited to, antisense or sense molecules, antibodies, enzymes, small molecule inhibitors and HAS substrate analogs. They also include hyaluronan degrading enzymes, such as hyaluronidases.

[0250] As used herein, a “hyaluronan degrading enzyme” refers to an enzyme that catalyzes the cleavage of a hyaluronan polymer (also referred to as hyaluronic acid or HA) into smaller molecular weight fragments. Exemplary of hyaluronan degrading enzymes are hyaluronidases, and particular chondroitinases and lyases that have the ability to depolymerize hyaluronan. Exemplary chondroitinases that are hyaluronan degrading enzymes include, but are not limited to, chondroitin ABC lyase (also known as chondroitinase ABC), chondroitin AC lyase (also known as chondroitin sulfate lyase or chondroitin sulfate eliminase) and chondroitin C lyase. Chondroitin ABC lyase comprises two enzymes, chondroitin-sulfate-ABC endolyase (EC 4.2.2.20) and chondroitin-sulfate-ABC exolyase (EC 4.2.2.21). An exemplary chondroitin-sulfate-ABC endolyases and chondroitin-sulfate-ABC exolyases include, but are not limited to, those from Proteus vulgaris and Flavobacterium heparinum (the Proteus vulgaris chondroitin-sulfate-ABC endolyase is set forth in SEQ ID NO:98; Sato et al. (1994) Appl. Microbiol. Biotechnol. 41(1):39-46). Exemplary chondroitinase AC enzymes from the bacteria include, but are not limited to, those from Flavobacterium heparinum, set forth in SEQ ID NO:99, Victivallis vadensis, set forth in SEQ ID NO:100, and Arthrobacter aurescens (Tkalec et al. (2000) Applied and Environmental Microbiology 66(1):29-35; Ernst et al. (1995) Critical Reviews in Biochemistry and Molecular Biology 30(5):387-444). Exemplary chondroitinase C enzymes from the bacteria include, but are not limited to, those from Streptococcus and Flavobacterium (Hibi et al. (1989) FEMS-Microbiol-Lett. 48(2):121-4; Michelacci et al. (1976) J. Biol. Chem. 251:1154-8; Tsuda et al. (1999) Eur. J. Biochem. 262:127-133).

[0251] As used herein, hyaluronidase refers to a class of hyaluronan degrading enzymes. Hyaluronidases include bacterial hyaluronidases (EC 4.2.2.1 or EC 4.2.99.1), hyaluronidases from leeches, other parasites, and crustaceans (EC 3.2.1.36), and mammalian-type hyaluronidases (EC 3.2.1.35). Hyaluronidases include any of non-human origin including, but not limited to, murine, canine, feline, leporine, avian, bovine, ovine, porcine, equine, piscine, ranine, bacterial, and any from leeches, other parasites, and crustaceans. Exemplary non-human hyaluronidases include, hyaluronidases from cows (SEQ ID NOs:10, 11, 64 and BH55 (U.S. Pat. Nos. 5,747,027 and 5,827,721), yellow jacket wasp (SEQ ID NOs:12 and 13), honey bee (SEQ ID NO:14), white-face hornet (SEQ ID NO:15), paper wasp (SEQ ID NO:16), mouse (SEQ ID NOs:17-19, 32), pig (SEQ ID NOs:20-21), rat (SEQ ID NOs:22-24, 31), rabbit (SEQ ID NO:25), sheep (SEQ ID NOs:26, 27, 63 and 65), chimpanzee (SEQ ID NO:101), Rhesus monkey (SEQ ID NO:102), orangutan (SEQ ID NO:28), cynomolgus monkey (SEQ ID NO:29), guinea pig (SEQ ID NO:30), Arthrobacter sp. (strain FB24) (SEQ ID NO:67), Bdellovibrio bacteriovorus (SEQ ID NO:68), Propionibacterium acnes (SEQ ID NO:69), Streptococcus agalactiae ((SEQ ID NO:70); 18RS21 (SEQ ID NO:71); serotype Ia (SEQ ID NO:72); and serotype III (SEQ ID NO:73)), Staphylococcus aureus (strain COL (SEQ ID NO:74); strain MRSA252 (SEQ ID NOs:75 and 76); strain MSSA476 (SEQ ID NO:77); strain NCTC 8325 (SEQ ID NO:78); strain bovine RF122 (SEQ ID NOs:79 and 80); and strain USA300 (SEQ ID NO:81)), Streptococcus pneumoniae ((SEQ ID NO:82); strain ATCC BAA-255/R6 (SEQ ID NO:83); and serotype 2, strain D39/NCTC 7466 (SEQ ID NO:84)), Streptococcus pyogenes (serotype M1 (SEQ ID NO:85); serotype M2, strain MGAS10270 (SEQ ID NO:86); serotype M4, strain MGAS10750 (SEQ ID NO:87); serotype M6 (SEQ ID NO:88); serotype M12, strain MGAS2096 (SEQ ID NOs:89 and 90); serotype M12, strain MGAS9429 (SEQ ID NO:91); and serotype M28 (SEQ ID NO:92)); Streptococcus suis (SEQ ID NOs:93-95); Vibrio fischeri (strain ATCC 700601/ES114 (SEQ ID NO:96)), and the Streptomyces hyaluronolyticus hyaluronidase enzyme, which is specific for hyaluronic acid and does not cleave chondroitin or chondroitin sulfate (Ohya, T. and Kaneko, Y. (1970) Biochim. Biophys. Acta 198:607). Hyaluronidases also include those of human origin. Exemplary human hyaluronidases include HYAL1 (SEQ ID NO:36), HYAL2 (SEQ ID NO:37), HYAL3 (SEQ ID NO:38), HYAL4 (SEQ ID NO:39), and PH20 (SEQ ID NO:1). Also included amongst hyaluronidases are soluble hyaluronidases, including, ovine and bovine PH20, soluble human PH20 and soluble rHuPH20. Examples of commercially available bovine or ovine soluble hyaluronidases include Vitrase® (ovine hyaluronidase), Amphadase® (bovine hyaluronidase) and Hydase™ (bovine hyaluronidase).

[0252] As used herein, “purified bovine testicular hyaluronidase” refers to a bovine hyaluronidase purified from bovine testicular extracts (see U.S. Pat. Nos. 2,488,564, 2,488,565, 2,806,815, 2,808,362, 2,676,139, 2,795,529, 5,747,027 and 5,827,721). Examples of commercially available purified bovine testicular hyaluronidases include Amphadase® and Hydase™, and bovine hyaluronidases, including, but not limited to, those available from Sigma Aldrich, Abnova, EMD Chemicals, GenWay Biotech, Inc., Raybiotech, Inc., and Calzyme. Also included are recombinantly produced bovine hyaluronidases, such as but not limited to, those generated by expression of a nucleic acid molecule set forth in any of SEQ ID NOs:190-192.

[0253] As used herein, “purified ovine testicular hyaluronidase” refers to an ovine hyaluronidase purified from ovine testicular extracts (see U.S. Pat. Nos. 2,488,564, 2,488,565 and 2,806,815 and International PCT Publication No. WO2005/118799). Examples of commercially available purified ovine testicular extract include Vitrase®, and ovine hyaluronidases, including, but not limited to, those available from Sigma Aldrich, Cell Sciences, EMD Chemicals, GenWay Biotech, Inc., Mybiosource.com and Raybiotech, Inc. Also included are recombinantly produced ovine hyaluronidases, such as, but not limited to, those generated by expression of a nucleic acid molecule set forth in any of SEQ ID NOs:66 and 193-194.

[0254] As used herein, “PH20” refers to a type of hyaluronidase that occurs in sperm and is neutral-active. PH-20 occurs on the sperm surface, and in the lysosome-derived acrosome, where it is bound to the inner acrosomal membrane. PH20 includes those of any origin including, but not limited to, human, chimpanzee, Cynomolgus monkey, Rhesus monkey, murine, bovine, ovine, guinea pig, rabbit and rat origin. Exemplary PH20 polypeptides include those from human (SEQ ID NO:1), chimpanzee (SEQ ID NO:101), Rhesus monkey (SEQ ID NO:102), Cynomolgus monkey (SEQ ID NO:29), cow (e.g., SEQ ID NOs:11 and 64), mouse (SEQ ID NO:32), rat (SEQ ID NO:31), rabbit (SEQ ID NO:25), sheep (SEQ ID NOs:27, 63 and 65) and guinea pig (SEQ ID NO:30).

[0255] Reference to hyaluronan degrading enzymes includes precursor hyaluronan degrading enzyme polypeptides and mature hyaluronan degrading enzyme polypeptides (such as those in which a signal sequence has been removed), truncated forms thereof that have activity, and includes allelic variants and species variants, variants encoded by splice variants, and other variants, including polypeptides that have at least 40%, 45%, 50%, 55%, 65%, 70%, 75%, 80%, 85%, 90%, 95%, 96%, 97%, 98%, 99% or more sequence identity to the precursor polypeptides set forth in SEQ ID NOs: 1 and 10-48, 63-65, 67-102, or the mature forms thereof. For example, reference to hyaluronan degrading enzyme also includes the human PH20 precursor polypeptide variants set forth in SEQ ID NOs:50-51. Hyaluronan degrading enzymes also include those that contain chemical or posttranslational modifications and those that do not contain chemical or posttranslational modifications. Such modifications include, but are not limited to, PEGylation, albumination, glycosylation, farnesylation, carboxylation, hydroxylation, phosphorylation, polypeptide modifications, such as fusion with sequences that increase half-life, aid in purification and other such modifications, known in the art. The hyaluronan degrading enzymes, such as the PH20 hyaluronidase also can be modified to have improved properties or properties for particular indications/uses. For example, U.S. Pat. No. 9,447,401, based on U.S. application Ser. No. 13/694,731, which provides thousands of modified PH20 polypeptides, providing a structure function map of PH20, including forms of PH20 that have increased stability in various conditions, increased activity, and other such properties. Exemplary of such modifications is a PH20 of any of SEQ ID NOs: 1 and 10-48, 63-65, 67-102, with the replacement F204P (with reference to the mature form of PH20). A truncated PH20 hyaluronidase is any C-terminal shortened form thereof, particularly forms that are truncated and neutral active when N-glycosylated.

[0256] As used herein, a “soluble PH20” refers to any form of PH20 that is soluble under physiologic conditions. A soluble PH20 can be identified, for example, by its partitioning into the aqueous phase of a Triton® X-114 solution at 37° C. (Bordier et al., (1981) J Biol. Chem., 256:1604-7). Membrane-anchored PH20, such as lipid-anchored PH20, including GPI-anchored PH20, will partition into the detergent-rich phase, but will partition into the detergent-poor or aqueous phase following treatment with Phospholipase-C. Included among soluble PH20 are membrane-anchored PH20 in which one or more regions associated with anchoring of the PH20 to the membrane has been removed or modified, where the soluble form retains hyaluronidase activity. Soluble PH20 also include recombinant soluble PH20 and those contained in or purified from natural sources, such as, for example, testes extracts from sheep or cows. Exemplary of such soluble PH20 is soluble human PH20.

[0257] As used herein, soluble human PH20 or sHuPH20 includes PH20 polypeptides lacking all or a portion of the glycosylphosphatidylinositol (GPI) anchor sequence at the C-terminus such that upon expression, the polypeptides are soluble under physiological conditions. Solubility can be assessed by any suitable method that demonstrates solubility under physiologic conditions. Exemplary of such methods is the Triton® X-114 assay, that assesses partitioning into the aqueous phase and that is described above and in the examples. In addition, a soluble human PH20 polypeptide is, if produced in CHO cells, such as CHO—S cells, a polypeptide that is expressed and is secreted into the cell culture medium. Soluble human PH20 polypeptides, however, are not limited to those produced in CHO cells, but can be produced in any cell or by any method, including recombinant expression and polypeptide synthesis. Reference to secretion by CHO cells is definitional. Hence, if a polypeptide could be expressed and secreted by CHO cells and is soluble, i.e. partitions into the aqueous phase when extracted with Triton® X-114, it is a soluble PH20 polypeptide whether or not it is so-produced. The precursor polypeptides for sHuPH20 polypeptides can include a signal sequence, such as a heterologous or non-heterologous (i.e. native) signal sequence. Exemplary of the precursors are those that include a signal sequence, such as the native 35 amino acid signal sequence at amino acid positions 1-35 (see, e.g., amino acids 1-35 of SEQ ID NO:1).

[0258] As used herein, an “extended soluble PH20” or “esPH20” includes soluble PH20 polypeptides that contain residues up to the GPI anchor-attachment signal sequence and one or more contiguous residues from the GPI-anchor attachment signal sequence such that the esPH20 is soluble under physiological conditions. Solubility under physiological conditions can be determined by any method known to those of skill in the art. For example, it can be assessed by the Triton® X-114 assay described above and in the examples. In addition, as discussed above, a soluble PH20 is, if produced in CHO cells, such as CHO—S cells, a polypeptide that is expressed and is secreted into the cell culture medium. Soluble human PH20 polypeptides, however, are not limited to those produced in CHO cells, but can be produced in any cell or by any method, including recombinant expression and polypeptide synthesis. Reference to secretion by CHO cells is definitional. Hence, if a polypeptide could be expressed and secreted by CHO cells and is soluble, i.e. partitions into the aqueous phase when extracted with Triton® X-114, it is a soluble PH20 polypeptide whether or not it is so-produced. Human soluble esPH20 polypeptides include, in addition to residues 36-490, one or more contiguous amino acids from amino acid residue position 491 of SEQ ID NO:1, inclusive, such that the resulting polypeptide is soluble. Exemplary human esPH20 soluble polypeptides are those that have amino acids residues corresponding to amino acids 36-491, 36-492, 36-493, 36-494, 36-495, 36-496 and 36-497 of SEQ ID NO:1. Exemplary of these are those with an amino acid sequence set forth in any of SEQ ID NOs:151-154 and 185-187. Also included are allelic variants and other variants, such as any with 40%, 45%, 50%, 55%, 65%, 70%, 75%, 80%, 85%, 90%, 91%, 92%, 93%, 94%, 95%, 96%, 97%, 98%, 99% or greater sequence identity with the corresponding polypeptides of SEQ ID NOs:151-154 and 185-187 that retain neutral activity and are soluble. Reference to sequence identity refers to variants with amino acid substitutions. The esPH20 polypeptides include those with modifications described in U.S. Pat. No. 9,447,401, based on U.S. application Ser. No. 13/694,731. Reference to “esPH20s” includes precursor esPH20 polypeptides and mature esPH20 polypeptides (such as those in which a signal sequence has been removed), truncated forms thereof that have enzymatic activity (retaining at least 1%, 10%, 20%, 30%, 40%, 50% or more of the full-length form) and are soluble, and includes allelic variants and species variants, variants encoded by splice variants, and other variants, including polypeptides that have at least 40%, 45%, 50%, 55%, 65%, 70%, 75%, 80%, 85%, 90%, 91%, 92%, 93%, 94%, 95%, 96%, 97%, 98%, 99% or more sequence identity to the precursor polypeptides set forth in SEQ ID NOs:1 and 3, or the mature forms thereof.

[0259] Reference to “esPH20s” also includes those that contain chemical or posttranslational modifications and those that do not contain chemical or posttranslational modifications. Such modifications include, but are not limited to, PEGylation, albumination, glycosylation, farnesylation, carboxylation, hydroxylation, phosphorylation, and other polypeptide modifications known in the art.

[0260] As used herein, “soluble recombinant human PH20 (rHuPH20)” refers to a composition containing solubles form of human PH20 as recombinantly expressed and secreted in Chinese Hamster Ovary (CHO) cells. Soluble rHuPH20 is encoded by nucleic acid molecule that includes the signal sequence and is set forth in SEQ ID NO:49. The nucleic acid encoding soluble rHuPH20 is expressed in CHO cells which secrete the mature polypeptide. As produced in the culture medium, there is heterogeneity at the C-terminus so that the product includes a mixture of species that can include any one or more of SEQ ID NO:4 to SEQ ID NO:9 in various abundance.

[0261] Similarly, for other forms of PH20, such as the esPH20s, recombinantly expressed polypeptides and compositions thereof can include a plurality of species whose C-terminus exhibits heterogeneity. For example, compositions of recombinantly expressed esPH20 produced by expression of the polypeptide of SEQ ID NO: 151, which encodes an esPH20 that has amino acids 36-497, can include forms with fewer amino acids, such as 36-496 or 36-495.

[0262] As used herein, an “N-linked moiety” refers to an asparagine (N) amino acid residue of a polypeptide that is capable of being glycosylated by post-translational modification of a polypeptide. Exemplary N-linked moieties of human PH20 include amino acids N82, N166, N235, N254, N368 and N393 of human PH20 set forth in SEQ ID NO:1.

[0263] As used herein, an “N-glycosylated polypeptide” refers to a PH20 polypeptide or truncated form thereto containing oligosaccharide linkage of at least three N-linked amino acid residues, for example, N-linked moieties corresponding to amino acid residues N235, N368 and N393 of SEQ ID NO:1. An N-glycosylated polypeptide can include a polypeptide where three, four, five and up to all of the N-linked moieties are linked to an oligosaccharide. The N-linked oligosaccharides can include oligomannose, complex, hybrid or sulfated oligosaccharides, or other oligosaccharides and monosaccharides.

[0264] As used herein, an “N-partially glycosylated polypeptide” refers to a polypeptide that minimally contains an N-acetylglucosamine glycan linked to at least three N-linked moieties. A partially glycosylated polypeptide can include various glycan forms, including monosaccharides, oligosaccharides, and branched sugar forms, including those formed by treatment of a polypeptide with EndoH, EndoF1, EndoF2 and/or EndoF3.

[0265] As used herein, a “deglycosylated PH20 polypeptide” refers to a PH20 polypeptide in which fewer than all possible glycosylation sites are glycosylated. Deglycosylation can be effected, for example, by removing glycosylation, by preventing it, or by modifying the polypeptide to eliminate a glycosylation site. Particular N-glycosylation sites are not required for activity, whereas others are required for activity. These sites and glycosylation patterns are described, for example, in U.S. Pat. Nos. 8,927,249 and 9,284,543.

[0266] As used herein, a “polymer” refers to any high molecular weight natural or synthetic moiety that is made up of repeating unites. Polymers include, but are not limited to, polyethylene glycol moieties, dextran, cellulose and sialic acid. These and other exemplary polymers are described herein, and many are known in the art. For purposes herein, the polymer can be conjugated to, i.e. stably linked directly or indirectly via a linker, to a polypeptide. Such polymer conjugates, typically increase serum half-life, and include, but are not limited to, sialic moieties, PEGylation moieties, dextran, and sugar and other moieties, such as for glycosylation. For example, hyaluronidases, such as a soluble PH20 or rHuPH20, can be conjugated to a polymer.

[0267] As used herein, a “conjugate” refers to a polypeptide linked directly or indirectly to one or more other polypeptides or chemical moieties. Such conjugates include fusion proteins, those produced by chemical conjugates and those produced by any other methods. For example, a conjugate refers to hyaluronan-degrading enzyme, such as a hyaluronidase or soluble PH20 polypeptide, linked directly or indirectly to one or more other polypeptides or chemical moieties, whereby at least one soluble PH20 polypeptide is linked, directly or indirectly to another polypeptide or chemical moiety so long as the conjugate retains hyaluronidase activity.

[0268] As used herein, a “polymer-conjugated hyaluronan-degrading enzyme” or a polymer-modified hyaluronan degrading enzyme refers to a hyaluronan-degrading enzyme that is linked directly or indirectly to a polymer, such as a PEG moiety, a polypeptide or other such moiety. For purposes herein reference to a polymer-conjugated soluble hyaluronidase refers to modifications that include, but are not limited to, PEGylation, sialation, linkage to a dextran, linkage to a polypeptide, phosphorylation, farnysylation and other modifications that increase serum half-life of the hyaluronidase, such as by increasing resistance to an endogenous protease, or decreasing clearance, or other mechanism. Hyaluronidase, such as human PH20 generally have short serum half-lives; linkage to such moieties increases half-life, thereby permitting systemic administration and administration for activity at sites distal to the site of administration, or a longer duration of activity regardless of mode or site of administration. The linkage can be any type of linkage, including, but not limited to, ionic and covalent bonds, and any other sufficiently stable associated interaction. Reference to a polymer-conjugated hyaluronan-degrading enzyme means that the conjugate exhibits hyaluronidase activity. Typically, the polymer-conjugate exhibits at least 20%, 30%, 40%, 50%, 60%, 70%, 80%, 90% or more of the hyaluronidase activity compared to the hyaluronan-degrading enzyme that is not conjugated to a polymer.

[0269] As used herein, “PEGylated” refers to covalent or other stable attachment of polymeric molecules, such as polyethylene glycol (PEGylation moiety PEG) to proteins, including hyaluronan degrading enzymes, such as hyaluronidases, typically to increase half-life of the hyaluronan degrading enzyme.

[0270] As used herein, an “anti-cancer agent” or “chemotherapeutic agent” refers to an agent that is capable of killing cells that divide rapidly, such as cancer cells. One of skill in the art is familiar with anti-cancer agents, including chemotherapeutic agents and immunotherapeutic agents and therapies. Exemplary agents are described herein.

[0271] As used herein, a “nucleoside analog” (or analogue) refers to an agent that replaces or mimics one of the building blocks of nucleic acids, such as a purine or pyrimidine nucleoside, during DNA replication. The process can arrest tumor growth, since additional nucleosides cannot attach. Exemplary of a nucleoside analog is gemcitabine, which, is a deoxycytidine analog and upon metabolic activation, forms a triphosphate that mimics or replaces the nucleoside cytidine to incorporate into DNA and competitively inhibit DNA synthesis.

[0272] As used herein, a “nucleoside deaminase” refers to an enzyme that effects deamination of a nucleoside. For example, cytidine deaminase (CDA) deaminates cytidine and deoxycytidine to uridine and deoxyuridine, respectively. Adenosine deaminase (ADA) deaminates adenosine, converting it to the related nucleoside inosine by the substitution of the amino group for a hydroxyl group.

[0273] As used herein, a “substrate” of a nucleoside deaminase is a molecule that can be deaminated to an inactive metabolite, and hence inactivated, in the presence of a nucleoside deaminase. Assays to assess deamination are known to one of skill in the art, and include, but are not limited to, high performance liquid chromatography (HPLC) or mass spectrometry for metabolites and deaminated metabolites, deamination assays such as a UDG-based deaminase assay using excess uracil-DNA glycosylase (see e.g. Morgan et al. (2004) J. Biol. Chem., 279:52353-52360) or by assessing cytotoxicity in cells known to express a nucleoside deaminase.

[0274] As used herein, the phrase “sufficient to reduce nucleoside deaminase protein levels or protein activity” refers to the amount of taxane that is required in order to inhibit the activity of a nucleoside deaminase. For example, the inhibition can be assessed by assaying the deamination activity of a deaminase (e.g. cytidine deaminase) using assays for deamination as described above. The inhibition also can be assessed by assaying for intracellular deaminase protein levels. Assays to assess subcellular proteins are well-known to one of skill in the art and include for example, cell-based ELISA, flow cytometry or protein detection methods such as Western blot. Generally, such assays can be performed on cell lysates or permeabilized cells. For example, western blot for cytidine deaminase can be performed by solubilizing total cell lysates, separating proteins, and immunoblotting for deaminase using an antibody against CDA (e.g. Cat. No. ab82346, Abcam) followed by incubation with a secondary horseradish peroxidase antibody, and detection. Generally, an amount is sufficient to reduce nucleoside deaminase protein levels or protein activity if the protein level or activity is reduced at least or at least about 10%, 20%, 30%, 40%, 50%, 60%, 70%, 80%, 90% or more.

[0275] As used herein, a “prodrug” is a compound which exhibits pharmacologic activity after biotransformation. For example, nucleoside analogs such as gemcitabine are prodrugs, whereby activity occurs as a result of intracellular conversion to two active metabolites, gemcitabine diphosphate and gemcitabine triphosphate by deoxycytidine kinase. The triphosphate (diflurorodeoxycytidine triphosphate) competes with endogenous deoxynucleoside triphosphates for incorporation into DNA.

[0276] As used herein, a “derivative” refers to a form of a drug that has undergone change or modification from a reference drug or agent, but still retains activity (e.g. exhibits increased or decreased activity) compared to the reference drug or agent. Typically a derivative form of a compound means that a side chain of the compound has been modified or changed.

[0277] As used herein, an “analogue” or analog of a drug or agent is a drug or agent that is related to a reference drug, but whose chemical and biological activities can be different. Typically, analogues exhibit similar activities to a reference drug or agent, but the activity can be increased or decreased or otherwise improved. Typically, an analogue form of a compound or drug means that the backbone core of the structure is modified or changed compared to a reference drug.

[0278] As used herein, “activity” refers to a functional activity or activities of a polypeptide or portion thereof associated with a full-length (complete) protein. For example, active fragments of a polypeptide can exhibit an activity of a full-length protein. Functional activities include, but are not limited to, biological activity, catalytic or enzymatic activity, antigenicity (ability to bind or compete with a polypeptide for binding to an anti-polypeptide antibody), immunogenicity, ability to form multimers, and the ability to specifically bind to a receptor or ligand for the polypeptide.

[0279] As used herein, “hyaluronidase activity” refers to the ability to enzymatically catalyze the cleavage of hyaluronic acid. The United States Pharmacopeia (USP) XXII assay for hyaluronidase determines hyaluronidase activity indirectly by measuring the amount of higher molecular weight hyaluronic acid, or hyaluronan, (HA) substrate remaining after the enzyme is allowed to react with the HA for 30 min at 37° C. (USP XXII-NF XVII (1990) 644-645 United States Pharmacopeia Convention, Inc., Rockville, Md.). A Reference Standard solution can be used in an assay to ascertain the relative activity, in units, of any hyaluronidase. In vitro assays to determine the hyaluronidase activity of hyaluronidases, such as PH20, including soluble PH20 and esPH20, are known in the art and described herein. Exemplary assays include the microturbidity assay that measures cleavage of hyaluronic acid by hyaluronidase indirectly by detecting the insoluble precipitate formed when the uncleaved hyaluronic acid binds with serum albumin and the biotinylated-hyaluronic acid assay that measures the cleavage of hyaluronic acid indirectly by detecting the remaining biotinylated-hyaluronic acid non-covalently bound to microtiter plate wells with a streptavidin-horseradish peroxidase conjugate and a chromogenic substrate. Reference Standards can be used, for example, to generate a standard curve to determine the activity in Units of the hyaluronidase being tested.

[0280] As used herein, “specific activity” refers to Units of activity per mg protein. The milligrams of hyaluronidase is defined by the absorption of a solution of at 280 nm assuming a molar extinction coefficient of approximately 1.7, in units of M⁻¹ cm⁻¹.

[0281] As used herein, “neutral active” refers to the ability of a PH20 polypeptide to enzymatically catalyze the cleavage of hyaluronic acid at neutral pH (e.g. at or about pH 7.0).

[0282] As used herein, a “GPI-anchor attachment signal sequence” is a C-terminal sequence of amino acids that directs addition of a preformed GPI-anchor to the polypeptide within the lumen of the ER. GPI-anchor attachment signal sequences are present in the precursor polypeptides of GPI-anchored polypeptides, such as GPI-anchored PH20 polypeptides. The C-terminal GPI-anchor attachment signal sequence typically contains a predominantly hydrophobic region of 8-20 amino acids, preceded by a hydrophilic spacer region of 8-12 amino acids, immediately downstream of the ω-site, or site of GPI-anchor attachment. GPI-anchor attachment signal sequences can be identified using methods well known in the art. These include, but are not limited to, in silico methods and algorithms (see, e.g. Udenfriend et al. (1995) Methods Enzymol. 250:571-582, Eisenhaber et al., (1999) J. Biol. Chem. 292: 741-758, Fankhauser et al., (2005) Bioinformatics 21:1846-1852, Omaetxebarria et al., (2007) Proteomics 7:1951-1960, Pierleoni et al., (2008) BMC Bioinformatics 9:392), including those that are readily available on bioinformatic websites, such as the ExPASy Proteomics tools site (e.g., the World Wide Web site expasy.ch/tools/).

[0283] As used herein, “nucleic acids” include DNA, RNA and analogs thereof, including peptide nucleic acids (PNA) and mixtures thereof. Nucleic acids can be single or double-stranded. When referring to probes or primers, which are optionally labeled, such as with a detectable label, such as a fluorescent or radiolabel, single-stranded molecules are contemplated. Such molecules are typically of a length such that their target is statistically unique or of low copy number (typically less than 5, generally less than 3) for probing or priming a library. Generally a probe or primer contains at least 14, 16 or 30 contiguous nucleotides of sequence complementary to or identical to a gene of interest. Probes and primers can be 10, 20, 30, 50, 100 or more nucleic acids long.

[0284] As used herein, a “peptide” refers to a polypeptide that is greater than or equal to 2 amino acids in length, and less than or equal to 40 amino acids in length.

[0285] As used herein, the amino acids which occur in the various sequences of amino acids provided herein are identified according to their known, three-letter or one-letter abbreviations (Table 1). The nucleotides which occur in the various nucleic acid fragments are designated with the standard single-letter designations used routinely in the art.

[0286] As used herein, an “amino acid” is an organic compound containing an amino group and a carboxylic acid group. A polypeptide contains two or more amino acids. For purposes herein, amino acids include the twenty naturally-occurring amino acids, non-natural amino acids and amino acid analogs (i.e., amino acids wherein the a-carbon has a side chain).

[0287] As used herein, “amino acid residue” refers to an amino acid formed upon chemical digestion (hydrolysis) of a polypeptide at its peptide linkages. The amino acid residues described herein are presumed to be in the “L” isomeric form. Residues in the “D” isomeric form, which are so designated, can be substituted for any L-amino acid residue as long as the desired functional property is retained by the polypeptide. NH2 refers to the free amino group present at the amino terminus of a polypeptide. COOH refers to the free carboxy group present at the carboxyl terminus of a polypeptide. In keeping with standard polypeptide nomenclature described in J. Biol. Chem., 243: 3557-3559 (1968), and adopted 37 C.F.R. §§ 1.821-1.822, abbreviations for amino acid residues are shown in Table 1:

TABLE 1
Table of Correspondence

SYMBOL

| 1-Letter | 3-Letter | AMINO ACID |
|---|---|---|
| Y | Tyr | Tyrosine |
| G | Gly | Glycine |
| F | Phe | Phenylalanine |
| M | Met | Methionine |
| A | Ala | Alanine |
| S | Ser | Serine |
| I | Ile | Isoleucine |
| L | Leu | Leucine |
| T | Thr | Threonine |
| V | Val | Valine |
| P | Pro | Proline |
| K | Lys | Lysine |
| H | His | Histidine |
| Q | Gln | Glutamine |
| E | Glu | Glutamic acid |
| Z | Glx | Glu and/or Gln |
| W | Trp | Tryptophan |
| R | Arg | Arginine |
| D | Asp | Aspartic acid |
| N | Asn | Asparagine |
| B | Asx | Asn and/or Asp |
| C | Cys | Cysteine |
| X | Xaa | Unknown or other |

[0288] All amino acid residue sequences represented herein by formulae have a left to right orientation in the conventional direction of amino-terminus to carboxyl-terminus. In addition, the phrase “amino acid residue” is defined to include the amino acids listed in the Table of Correspondence (Table 1) and modified and unusual amino acids, such as those referred to in 37 C.F.R. §§ 1.821-1.822, and incorporated herein by reference. Furthermore, it should be noted that a dash at the beginning or end of an amino acid residue sequence indicates a peptide bond to a further sequence of one or more amino acid residues, to an amino-terminal group such as NH2 or to a carboxyl-terminal group such as COOH.

[0289] As used herein, the “naturally occurring a-amino acids” are the residues of those 20 α-amino acids found in nature which are incorporated into protein by the specific recognition of the charged tRNA molecule with its cognate mRNA codon in humans. Non-naturally occurring amino acids thus include, for example, amino acids or analogs of amino acids other than the 20 naturally-occurring amino acids and include, but are not limited to, the D-stereoisomers of amino acids. Exemplary non-natural amino acids are described herein and are known to those of skill in the art.

[0290] As used herein, a “DNA construct” is a single- or double-stranded, linear or circular DNA molecule that contains segments of DNA combined and juxtaposed in a manner not found in nature. DNA constructs exist as a result of human manipulation, and include clones and other copies of manipulated molecules.

[0291] As used herein, a “DNA segment” is a portion of a larger DNA molecule having specified attributes. For example, a DNA segment encoding a specified polypeptide is a portion of a longer DNA molecule, such as a plasmid or plasmid fragment, which, when read from the 5′ to 3′ direction, encodes the sequence of amino acids of the specified polypeptide.

[0292] As used herein, the term “polynucleotide” means a single- or double-stranded polymer of deoxyribonucleotides or ribonucleotide bases read from the 5′ to the 3′ end. Polynucleotides include RNA and DNA, and can be isolated from natural sources, synthesized in vitro, or prepared from a combination of natural and synthetic molecules. The length of a polynucleotide molecule is given herein in terms of nucleotides (abbreviated “nt”) or base pairs (abbreviated “bp”). The term nucleotides is used for single- and double-stranded molecules where the context permits. When the term is applied to double-stranded molecules it is used to denote overall length and will be understood to be equivalent to the term base pairs. It will be recognized by those skilled in the art that the two strands of a double-stranded polynucleotide can differ slightly in length and that the ends thereof can be staggered; thus all nucleotides within a double-stranded polynucleotide molecule may not be paired. Such unpaired ends will, in general, not exceed 20 nucleotides in length.

[0293] As used herein, “similarity” between two proteins or nucleic acids refers to the relatedness between the sequence of amino acids of the proteins or the nucleotide sequences of the nucleic acids. Similarity can be based on the degree of identity and/or homology of sequences of residues and the residues contained therein. Methods for assessing the degree of similarity between proteins or nucleic acids are known to those of skill in the art. For example, in one method of assessing sequence similarity, two amino acid or nucleotide sequences are aligned in a manner that yields a maximal level of identity between the sequences. “Identity” refers to the extent to which the amino acid or nucleotide sequences are invariant. Alignment of amino acid sequences, and to some extent nucleotide sequences, also can take into account conservative differences and/or frequent substitutions in amino acids (or nucleotides). Conservative differences are those that preserve the physico-chemical properties of the residues involved. Alignments can be global (alignment of the compared sequences over the entire length of the sequences and including all residues) or local (the alignment of a portion of the sequences that includes only the most similar region or regions).

[0294] As used herein, herein identity (of sequences) is its art-recognized meaning. “Identity” per se has an art-recognized meaning and can be calculated using published techniques (See, e.g. Computational Molecular Biology, Lesk, A. M., ed., Oxford University Press, New York, 1988; Biocomputing: Informatics and Genome Projects, Smith, D. W., ed., Academic Press, New York, 1993; Computer Analysis of Sequence Data, Part I, Griffin, A. M., and Griffin, H. G., eds., Humana Press, New Jersey, 1994; Sequence Analysis in Molecular Biology, von Heinje, G., Academic Press, 1987; and Sequence Analysis Primer, Gribskov, M. and Devereux, J., eds., M Stockton Press, New York, 1991). While there exists a number of methods to measure identity between two polynucleotides or polypeptides, the term “identity” is well known to skilled artisans (Carrillo, H. & Lipman, D., SIAM J Applied Math 48:1073 (1988)).

[0295] As used herein, “homologous” (with respect to nucleic acid and/or amino acid sequences) means about greater than or equal to 25% sequence homology, typically greater than or equal to 25%, 40%, 50%, 60%, 70%, 80%, 85%, 90% or 95% sequence homology; the precise percentage can be specified if necessary. For purposes herein, the terms “homology” and “identity” are often used interchangeably, unless otherwise indicated. In general, for determination of the percentage homology or identity, sequences are aligned so that the highest order match is obtained (see, e.g.: Computational Molecular Biology, Lesk, A. M., ed., Oxford University Press, New York, 1988; Biocomputing: Informatics and Genome Projects, Smith, D. W., ed., Academic Press, New York, 1993; Computer Analysis of Sequence Data, Part I, Griffin, A. M., and Griffin, H. G., eds., Humana Press, New Jersey, 1994; Sequence Analysis in Molecular Biology, von Heinje, G., Academic Press, 1987; and Sequence Analysis Primer, Gribskov, M. and Devereux, J., eds., M Stockton Press, New York, 1991; Carrillo et al. (1988) SIAM J Applied Math 48:1073). By sequence homology, the number of conserved amino acids is determined by standard alignment algorithms programs, and can be used with default gap penalties established by each supplier. Substantially homologous nucleic acid molecules would hybridize typically at moderate stringency or at high stringency all along the length of the nucleic acid of interest. Also contemplated are nucleic acid molecules that contain degenerate codons in place of codons in the hybridizing nucleic acid molecule.

[0296] Whether any two molecules have nucleotide sequences or amino acid sequences that are at least 60%, 70%, 80%, 85%, 90%, 95%, 96%, 97%, 98% or 99% “identical” or “homologous” can be determined using known computer algorithms such as the “FASTA” program, using for example, the default parameters as in Pearson et al. (1988) Proc. Natl. Acad. Sci. USA 85:2444 (other programs include the GCG program package (Devereux, J., et al., Nucleic Acids Research 12(I):387 (1984)), BLASTP, BLASTN, FASTA (Altschul, S. F., et al., J Mol. Biol. 215:403 (1990)); Guide to Huge Computers, Martin J. Bishop, ed., Academic Press, San Diego, 1994, and Carrillo et al. (1988) SIAM J Applied Math 48:1073). For example, the BLAST function of the National Center for Biotechnology Information database can be used to determine identity. Other commercially or publicly available programs include, DNAStar “MegAlign” program (Madison, Wis.) and the University of Wisconsin Genetics Computer Group (UWG) “Gap” program (Madison Wis.). Percent homology or identity of proteins and/or nucleic acid molecules can be determined, for example, by comparing sequence information using a GAP computer program (e.g., Needleman et al. (1970) J. Mol. Biol. 48:443, as revised by Smith and Waterman (1981) Adv. Appl. Math. 2:482). Briefly, the GAP program defines similarity as the number of aligned symbols (i.e., nucleotides or amino acids), which are similar, divided by the total number of symbols in the shorter of the two sequences. Default parameters for the GAP program can include: (1) a unary comparison matrix (containing a value of 1 for identities and 0 for non-identities) and the weighted comparison matrix of Gribskov et al. (1986) Nucl. Acids Res. 14:6745, as described by Schwartz and Dayhoff, eds., ATLAS OF PROTEIN SEQUENCE AND STRUCTURE, National Biomedical Research Foundation, pp. 353-358 (1979); (2) a penalty of 3.0 for each gap and an additional 0.10 penalty for each symbol in each gap; and (3) no penalty for end gaps.

[0297] Therefore, as used herein, the term “identity” or “homology” represents a comparison between a test and a reference polypeptide or polynucleotide. As used herein, the term at least “90% identical to” refers to percent identities from 90 to 99.99 relative to the reference nucleic acid or amino acid sequence of the polypeptide. Identity at a level of 90% or more is indicative of the fact that, assuming for exemplification purposes a test and reference polypeptide length of 100 amino acids are compared. No more than 10% (i.e., 10 out of 100) of the amino acids in the test polypeptide differs from that of the reference polypeptide. Similar comparisons can be made between test and reference polynucleotides. Such differences can be represented as point mutations randomly distributed over the entire length of a polypeptide or they can be clustered in one or more locations of varying length up to the maximum allowable, e.g. 10/100 amino acid difference (approximately 90% identity). Differences are defined as nucleic acid or amino acid substitutions, insertions or deletions. At the level of homologies or identities above about 85-90%, the result should be independent of the program and gap parameters set; such high levels of identity can be assessed readily, often by manual alignment without relying on software.

[0298] As used herein, an “aligned” sequence refers to the use of homology (similarity and/or identity) to align corresponding positions in a sequence of nucleotides or amino acids. Typically, two or more sequences that are related by 50% or more identity are aligned. An aligned set of sequences refers to 2 or more sequences that are aligned at corresponding positions and can include aligning sequences derived from RNAs, such as ESTs and other cDNAs, aligned with genomic DNA sequence.

[0299] As used herein, “primer” refers to a nucleic acid molecule that can act as a point of initiation of template-directed DNA synthesis under appropriate conditions (e.g., in the presence of four different nucleoside triphosphates and a polymerization agent, such as DNA polymerase, RNA polymerase or reverse transcriptase) in an appropriate buffer and at a suitable temperature. It will be appreciated that certain nucleic acid molecules can serve as a “probe” and as a “primer.” A primer, however, has a 3′ hydroxyl group for extension. A primer can be used in a variety of methods, including, for example, polymerase chain reaction (PCR), reverse-transcriptase (RT)-PCR, RNA PCR, LCR, multiplex PCR, panhandle PCR, capture PCR, expression PCR, 3′ and 5′ RACE, in situ PCR, ligation-mediated PCR and other amplification protocols.

[0300] As used herein, “primer pair” refers to a set of primers that includes a 5′ (upstream) primer that hybridizes with the 5′ end of a sequence to be amplified (e.g. by PCR) and a 3′ (downstream) primer that hybridizes with the complement of the 3′ end of the sequence to be amplified.

[0301] As used herein, “specifically hybridizes” refers to annealing, by complementary base-pairing, of a nucleic acid molecule (e.g. an oligonucleotide) to a target nucleic acid molecule. Those of skill in the art are familiar with in vitro and in vivo parameters that affect specific hybridization, such as length and composition of the particular molecule. Parameters particularly relevant to in vitro hybridization further include annealing and washing temperature, buffer composition and salt concentration. Exemplary washing conditions for removing non-specifically bound nucleic acid molecules at high stringency are 0.1×SSPE, 0.1% SDS, 65° C., and at medium stringency are 0.2×SSPE, 0.1% SDS, 50° C. Equivalent stringency conditions are known in the art. The skilled person can readily adjust these parameters to achieve specific hybridization of a nucleic acid molecule to a target nucleic acid molecule appropriate for a particular application. Complementary, when referring to two nucleotide sequences, means that the two sequences of nucleotides are capable of hybridizing, typically with less than 25%, 15% or 5% mismatches between opposed nucleotides. If necessary, the percentage of complementarity will be specified. Typically, the two molecules are selected such that they will hybridize under conditions of high stringency.

[0302] As used herein, “substantially identical” to a product means sufficiently similar so that the property of interest is sufficiently unchanged so that the substantially identical product can be used in place of the product.

[0303] As used herein, it also is understood that the terms “substantially identical” or “similar” varies with the context as understood by those skilled in the relevant art.

[0304] As used herein, an “allelic” variant or allelic variation references any of two or more alternative forms of a gene occupying the same chromosomal locus. Allelic variation arises naturally through mutation, and can result in phenotypic polymorphism within populations. Gene mutations can be silent (no change in the encoded polypeptide) or can encode polypeptides having altered amino acid sequence. The term “allelic variant” also is used herein to denote a protein encoded by an allelic variant of a gene. Typically, the reference form of the gene encodes a wildtype form and/or predominant form of a polypeptide from a population or single reference member of a species. Typically, allelic variants, which include variants between and among species typically have at least 80%, 90% or greater amino acid identity with a wildtype and/or predominant form from the same species; the degree of identity depends upon the gene and whether comparison is interspecies or intraspecies. Generally, intraspecies allelic variants have at least about 80%, 85%, 90% or 95% or greater identity with a wildtype and/or predominant form, including 96%, 97%, 98%, 99% or greater identity with a wildtype and/or predominant form of a polypeptide. Reference to an allelic variant herein generally refers to variations in proteins among members of the same species.

[0305] As used herein, “allele,” which is used interchangeably herein with “allelic variant” refers to alternative forms of a gene or portions thereof. Alleles occupy the same locus or position on homologous chromosomes. When a subject has two identical alleles of a gene, the subject is said to be homozygous for that gene or allele. When a subject has two different alleles of a gene, the subject is said to be heterozygous for the gene. Alleles of a specific gene can differ from each other in a single nucleotide or several nucleotides, and can include modifications such as substitutions, deletions and insertions of nucleotides. An allele of a gene also can be a form of a gene containing a mutation.

[0306] As used herein, species “variants” refer to variants in polypeptides among different species, including different mammalian species, such as mouse and human. For example for PH20, exemplary of species variants provided herein are primate PH20, such as, but not limited to, human, chimpanzee, macaque and cynomolgus monkey. Generally, species variants have 70%, 75%, 80%, 85%, 90%, 91%, 92%, 93%, 94%, 95%, 96%, 97%, 98% or sequence identity. Corresponding residues between and among species variants can be determined by comparing and aligning sequences to maximize the number of matching nucleotides or residues, for example, such that identity between the sequences is equal to or greater than 95%, equal to or greater than 96%, equal to or greater than 97%, equal to or greater than 98% or equal to or greater than 99%. The position of interest is then given the number assigned in the reference nucleic acid molecule. Alignment can be effected manually or by eye, particularly, where sequence identity is greater than 80%.

[0307] As used herein, a human protein is one encoded by a nucleic acid molecule, such as DNA, present in the genome of a human, including all allelic variants and conservative variations thereof. A variant or modification of a protein is a human protein if the modification is based on the wildtype or prominent sequence of a human protein.

[0308] As used herein, a splice variant refers to a variant produced by differential processing of a primary transcript of genomic DNA that results in more than one type of mRNA.

[0309] As used herein, modification is in reference to modification of a sequence of amino acids of a polypeptide or a sequence of nucleotides in a nucleic acid molecule and includes deletions, insertions, and replacements (e.g. substitutions) of amino acids and nucleotides, respectively. Exemplary of modifications are amino acid substitutions. An amino-acid substituted polypeptide can exhibit 65%, 70%, 80%, 85%, 90%, 91%, 92%, 93%, 94%, 95%, 96%, 97%, 98% or more sequence identity to a polypeptide not containing the amino acid substitutions. Amino acid substitutions can be conservative or non-conservative. Generally, any modification to a polypeptide retains an activity of the polypeptide. Methods of modifying a polypeptide are routine to those of skill in the art, such as by using recombinant DNA methodologies.

[0310] As used herein, suitable conservative substitutions of amino acids are known to those of skill in this art and can be made generally without altering the biological activity of the resulting molecule. Those of skill in this art recognize that, in general, single amino acid substitutions in non-essential regions of a polypeptide do not substantially alter biological activity (see, e.g., Watson et al. Molecular Biology of the Gene, 4th Edition, 1987, The Benjamin/Cummings Pub. co., p. 224). Such substitutions can be made in accordance with those set forth in Table 2 as follows:

TABLE 2

| Original residue | Exemplary conservative substitution |
|---|---|
| Ala (A) | Gly; Ser |
| Arg (R) | Lys |
| Asn (N) | Gln; His |
| Cys (C) | Ser |
| Gln (Q) | Asn |
| Glu (E) | Asp |
| Gly (G) | Ala; Pro |
| His (H) | Asn; Gln |
| Ile (I) | Leu; Val |
| Leu (L) | Ile; Val |
| Lys (K) | Arg; Gln; Glu |
| Met (M) | Leu; Tyr; Ile |
| Phe (F) | Met; Leu; Tyr |
| Ser (S) | Thr |
| Thr (T) | Ser |
| Trp (W) | Tyr |
| Tyr (Y) | Trp; Phe |
| Val (V) | Ile; Leu |

Other substitutions also are permissible and can be determined empirically or in accord with known conservative substitutions.

[0311] As used herein, the term “promoter” means a portion of a gene containing DNA sequences that provide for the binding of RNA polymerase and initiation of transcription. Promoter sequences are commonly, but not always, found in the 5′ non-coding region of genes.

[0312] As used herein, “isolated” or “purified” polypeptide or protein or biologically-active portion thereof, or antibody or antigen-binding fragment thereof, is substantially free of cellular material or other contaminating proteins from the cell or tissue from which the protein is derived, or substantially free from chemical precursors or other chemicals when chemically synthesized. Preparations can be determined to be substantially free if they appear free of readily detectable impurities as determined by standard methods of analysis, such as thin layer chromatography (TLC), gel electrophoresis and high performance liquid chromatography (HPLC), used by those of skill in the art to assess such purity, or sufficiently pure such that further purification would not detectably alter the physical and chemical properties, such as enzymatic and biological activities, of the substance. Methods for purification of the compounds to produce substantially chemically pure compounds are known to those of skill in the art. A substantially chemically pure compound, however, can be a mixture of stereoisomers. In such instances, further purification might increase the specific activity of the compound.

[0313] Hence, reference to a substantially purified polypeptide, such as a substantially purified soluble PH20, refers to preparations of proteins that are substantially free of cellular material includes preparations of proteins in which the protein is separated from cellular components of the cells from which it is isolated or recombinantly-produced. In one embodiment, the term substantially free of cellular material includes preparations of enzyme proteins having less than about 30% (by dry weight) of non-enzyme proteins (also referred to herein as a contaminating protein), generally less than about 20% of non-enzyme proteins or 10% of non-enzyme proteins or less than about 5% of non-enzyme proteins. When the enzyme protein is recombinantly produced, it also is substantially free of culture medium, i.e., culture medium represents less than about or at 20%, 10% or 5% of the volume of the enzyme protein preparation.

[0314] As used herein, the term “substantially free” of chemical precursors or other chemicals includes preparations of enzyme proteins in which the protein is separated from chemical precursors or other chemicals that are involved in the synthesis of the protein. The term includes preparations of enzyme proteins having less than about 30% (by dry weight), 20%, 10%, 5% or less of chemical precursors or non-enzyme chemicals or components.

[0315] As used herein, “synthetic” with reference to, for example, a synthetic nucleic acid molecule or a synthetic gene or a synthetic peptide refers to a nucleic acid molecule or polypeptide molecule that is produced by recombinant methods and/or by chemical synthesis methods.

[0316] As used herein, production by “recombinant means” or using “recombinant DNA methods” means the use of the well-known methods of molecular biology for expressing proteins encoded by cloned DNA.

[0317] As used herein, “vector” (or plasmid) refers to discrete elements that are used to introduce a heterologous nucleic acid into cells for either expression or replication thereof. The vectors typically remain episomal, but can be designed to effect integration of a gene or portion thereof into a chromosome of the genome. Also contemplated are vectors that are artificial chromosomes, such as yeast artificial chromosomes and mammalian artificial chromosomes. Selection and use of such vehicles are well known to those of skill in the art.

[0318] As used herein, an “expression vector” includes vectors capable of expressing DNA that is operatively linked with regulatory sequences, such as promoter regions, that are capable of effecting expression of such DNA fragments. Such additional segments can include promoter and terminator sequences, and optionally can include one or more origins of replication, one or more selectable markers, an enhancer, a polyadenylation signal. Expression vectors are generally derived from plasmid or viral DNA, or can contain elements of both. Thus, an expression vector refers to a recombinant DNA or RNA construct, such as a plasmid, a phage, recombinant virus or other vector that, upon introduction into an appropriate host cell, results in expression of the cloned DNA. Appropriate expression vectors are well known to those of skill in the art and include those that are replicable in eukaryotic cells and/or prokaryotic cells and those that remain episomal or those which integrate into the host cell genome.

[0319] As used herein, vector also includes “virus vectors” or “viral vectors.” Viral vectors are engineered viruses that are operatively linked to exogenous genes to transfer (as vehicles or shuttles) the exogenous genes into cells.

[0320] As used herein, “operably” or “operatively linked” when referring to DNA segments means that the segments are arranged so that they function in concert for their intended purposes, e.g., transcription initiates downstream of the promoter and upstream of any transcribed sequences. The promoter is usually the domain to which the transcriptional machinery binds to initiate transcription and proceeds through the coding segment to the terminator.

[0321] As used herein, the term “assessing” is intended to include quantitative and qualitative determination in the sense of obtaining an absolute value for the activity of a protein, such as an enzyme, or a domain thereof, present in the sample, and also of obtaining an index, ratio, percentage, visual or other value indicative of the level of the activity. Assessment can be direct or indirect. For example, the chemical species actually detected need not of course be the enzymatically cleaved product itself but can for example be a derivative thereof or some further substance. For example, detection of a cleavage product can be a detectable moiety such as a fluorescent moiety.

[0322] As used herein, “biological activity” refers to the in vivo activities of a compound or physiological responses that result upon in vivo administration of a compound, composition or other mixture. Biological activity, thus, encompasses therapeutic effects and pharmaceutical activity of such compounds, compositions and mixtures. Biological activities can be observed in in vitro systems designed to test or use such activities. Thus, for purposes herein a biological activity of a hyaluronidase enzyme is its degradation of hyaluronic acid.

[0323] As used herein, “equivalent”, when referring to two sequences of nucleic acids, means that the two sequences in question encode the same sequence of amino acids or equivalent proteins. When equivalent is used in referring to two proteins or peptides, it means that the two proteins or peptides have substantially the same amino acid sequence with only amino acid substitutions that do not substantially alter the activity or function of the protein or peptide. When equivalent refers to a property, e.g., of an antibody, the property does not need to be present to the same extent (e.g., two peptides can exhibit different rates of the same type of enzymatic activity), but the activities are usually substantially the same.

[0324] As used herein, “modulate” and “modulation” or “alter” refer to a change of an activity of a molecule, such as a protein or antibody. Exemplary activities include, but are not limited to, biological activities, such as signal transduction. Modulation can include an increase in the activity (i.e., up-regulation or agonist activity), a decrease in activity (i.e., down-regulation or inhibition) or any other alteration in an activity (such as a change in periodicity, frequency, duration, kinetics or other parameter). Modulation can be context dependent and typically modulation is compared to a designated state, for example, the wildtype protein, the protein in a constitutive state, or the protein as expressed in a designated cell type or condition.

[0325] As used herein, “direct administration” refers to a composition that is administered without dilution.

[0326] As used herein, a “single dosage formulation” refers to a formulation for use only once. Typically, a single dosage formulation is for direct administration.

[0327] As used herein, a “multiple dosage formulation” refers to a formulation for use in repeat administrations.

[0328] As used herein, a “composition” refers to any mixture. It can be a solution, suspension, liquid, powder, paste, aqueous, non-aqueous or any combination thereof.

[0329] As used herein, a “combination” refers to any association between or among two or more items. The combination can be two or more separate items, such as two compositions or two collections, can be a mixture thereof, such as a single mixture of the two or more items, or any variation thereof. The elements of a combination are generally functionally associated or related.

[0330] As used herein, a “kit” refers to a combination of components, such as a combination of the compositions herein and another item for a purpose including, but not limited to, reconstitution, activation, and instruments/devices for delivery, administration, diagnosis, and assessment of a biological activity or property. Kits optionally include instructions for use.

[0331] As used herein, “disease or disorder” refers to a pathological condition in an organism resulting from cause or condition including, but not limited to, infections, acquired conditions, genetic conditions, and characterized by identifiable symptoms. Diseases and disorders of interest herein are hyaluronan-associated diseases and disorders.

[0332] As used herein, “intravenous administration” refers to delivery of a therapeutic directly into a vein.

[0333] As used herein, a “hyaluronan-associated cancer” or “hyaluronan rich cancers” include cancers in which hyaluronan levels are elevated as cause, consequence or otherwise observed in the disease or condition. Hyaluronan-associated cancers or tumors are associated with elevated hyaluronan levels in a tissue or cell, increased interstitial fluid pressure, decreased vascular volume, and/or increased water content in a tissue. Such cancers include, for example, tumors, including solid tumors such as late-stage cancers, metastatic cancers, undifferentiated cancers, ovarian cancer, in situ carcinoma (ISC), squamous cell carcinoma (SCC), prostate cancer, pancreatic cancer, non-small cell lung cancer, breast cancer, colon cancer and other cancers.

[0334] As used herein, “elevated” hyaluronan levels refers to amounts of hyaluronan in particular tissue, body fluid or cell, dependent upon the disease or condition, consequence or otherwise observed in the disease. For example, as consequence of the presence of a hyaluronan-rich tumor, hyaluronan (HA) levels can be elevated in body fluids, such as blood, urine, saliva and serum, and/or in the tumorous tissue or cell. The level can be compared to a standard or other suitable control, such as a comparable sample from a subject who does not have the HA-associated disease.

[0335] As used herein, “treating” a subject with a disease or condition means that the subject's symptoms are partially or totally alleviated, or remain static following treatment. Hence, treatment encompasses prophylaxis, therapy and/or cure. Prophylaxis refers to prevention of a potential disease and/or a prevention of worsening of symptoms or progression of a disease.

[0336] As used herein, a “pharmaceutically effective agent” includes any therapeutic agent or bioactive agents, including, but not limited to, for example, chemotherapeutics, anesthetics, vasoconstrictors, dispersing agents, conventional therapeutic drugs, including small molecule drugs and therapeutic proteins.

[0337] As used herein, “treatment” means any manner in which the symptoms of a condition, disorder or disease or other indication, are ameliorated or otherwise beneficially altered.

[0338] As used herein, “therapeutic effect” means an effect resulting from treatment of a subject that alters, typically improves or ameliorates the symptoms of a disease or condition or that cures a disease or condition. A therapeutically effective amount refers to the amount of a composition, molecule or compound which results in a therapeutic effect following administration to a subject.

[0339] As used herein, “about the same” means within an amount that one of skill in the art would consider to be the same or to be within an acceptable range of error. For example, typically, for pharmaceutical compositions, within at least 1%, 2%, 3%, 4%, 5% or 10% is considered about the same. Such amount can vary depending upon the tolerance for variation in the particular composition by subjects.

[0340] As used herein, “dosing regimen” refers to the amount of agent, for example, the composition containing an anti-hyaluronan agent, for example a soluble hyaluronidase or other agent, administered, and the frequency of administration. The dosing regimen is a function of the disease or condition to be treated, and thus can vary.

[0341] As used herein, “frequency of administration” refers to the time between successive administrations of treatment. For example, frequency can be days, weeks or months. For example, frequency can be more than once weekly, for example, twice a week, three times a week, four times a week, five times a week, six times a week or daily. Frequency also can be one, two, three or four weeks. The particular frequency is a function of the particular disease or condition treated. Generally, frequency is more than once weekly, and generally is twice weekly.

[0342] As used herein, a “cycle of administration” refers to the repeated schedule of the dosing regimen of administration of the enzyme and/or a second agent that is repeated over successive administrations. For example, an exemplary cycle of administration is a 28 day cycle with administration twice weekly for three weeks, followed by one-week of discontinued dosing.

[0343] As used herein, when referencing dosage based on mg/kg of the subject, an average human subject is considered to have a mass of about 70 kg-75 kg, such as 70 kg and a body surface area (BSA) of 1.73.

[0344] As used herein, “amelioration” of the symptoms of a particular disease or disorder by a treatment, such as by administration of a pharmaceutical composition or other therapeutic, refers to any lessening, whether permanent or temporary, lasting or transient, of the symptoms or, adverse effects of a condition, such as, for example, reduction of adverse effects associated with or that occur upon administration of an anti-hyaluronan agent, such as a PEGylated hyaluronidase.

[0345] As used herein, “prevention” or “prophylaxis” refers to reduction in the risk of developing a disease or condition.

[0346] As used herein, a “therapeutically effective amount” or a “therapeutically effective dose” refers to the quantity of an agent, compound, material, or composition containing a compound that is at least sufficient to produce a therapeutic effect. Hence, it is the quantity necessary for preventing, curing, ameliorating, arresting or partially arresting a symptom of a disease or disorder.

[0347] As used herein, “unit dose form” refers to physically discrete units suitable for human and animal subjects and packaged individually as is known in the art.

[0348] As used herein, a “single dosage formulation” refers to a formulation as a single dose.

[0349] As used herein, an “article of manufacture” is a product that is made and sold. As used throughout this application, the term is intended to encompass anti-hyaluronan agents, for example hyaluronan degrading enzyme, such as hyaluronidase, and second agent compositions contained in articles of packaging. For example, a second agent is a corticosteroid, tumor-targeted taxane or chemotherapeutic agent.

[0350] As used herein, “fluid” refers to any composition that can flow. Fluids thus encompass compositions that are in the form of semi-solids, pastes, solutions, aqueous mixtures, gels, lotions, creams and other such compositions.

[0351] As used herein, a “cellular extract” or “lysate” refers to a preparation or fraction which is made from a lysed or disrupted cell.

[0352] As used herein, “animal” includes any animal, such as, but are not limited to primates including humans, gorillas and monkeys; rodents, such as mice and rats; fowl, such as chickens; ruminants, such as goats, cows, deer, and sheep; pigs; and other animals. Non-human animals exclude humans as the contemplated animal. The hyaluronidases used in the methods provided herein are from any source, animal, plant, prokaryotic and fungal. Most hyaluronidases are of animal origin, including mammalian origin. Generally, hyaluronidases are of human origin.

[0353] As used herein, “anti-cancer treatments” include administration of drugs and other agents for treating cancer, and also treatment protocols, such as surgery and radiation. Anti-cancer treatments include administration of anti-cancer agents.

[0354] As used herein, an “anti-cancer agent” refers to any agents, or compounds, used in anti-cancer treatment. These include any agents, when used alone or in combination with other compounds, that can alleviate, reduce, ameliorate, prevent, or place or maintain in a state of remission of clinical symptoms or diagnostic markers associated with tumors and cancer, and can be used in combinations and compositions provided herein. Exemplary anti-cancer agents include, but are not limited to, hyaluronan-degrading enzymes, such as the PEGylated hyaluronan degrading enzymes provided herein used singly and/or in combination with other anti-cancer agents, such as chemotherapeutics, polypeptides, antibodies, peptides, small molecules or gene therapy vectors, viruses or DNA.

[0355] As used herein, a “control” refers to a sample that is substantially identical to the test sample, except that it is not treated with a test parameter, or, if it is a plasma sample, it can be from a normal volunteer not affected with the condition of interest. A control also can be an internal control.

[0356] As used herein, the singular forms “a,” “an” and “the” include plural referents unless the context clearly dictates otherwise. Thus, for example, reference to a compound comprising or containing “an extracellular domain” includes compounds with one or a plurality of extracellular domains.

[0357] As used herein, ranges and amounts can be expressed as “about” a particular value or range. About also includes the exact amount. Hence “about 5 bases” means “about 5 bases” and also “5 bases.”

[0358] As used herein, “optional” or “optionally” means that the subsequently described event or circumstance does or does not occur, and that the description includes instances where said event or circumstance occurs and instances where it does not. For example, an optionally substituted group means that the group is unsubstituted or is substituted.

[0359] As used herein, the abbreviations for any protective groups, amino acids and other compounds, are, unless indicated otherwise, in accord with their common usage, recognized abbreviations, or the IUPAC-IUB Commission on Biochemical Nomenclature (see, (1972) Biochem. 11:1726).

### B. Extracellular Matrix (ECM) Remodeling in Hyaluronan-Associated Disorders

[0360] 1. Hyaluronan (HA) Associated Diseases and Conditions

[0361] Hyaluronan (HA) is a naturally occurring polysaccharide. It readily binds water to create a gel-like fluid. Hyaluronan-associated conditions and diseases typically are diseases and conditions in which HA levels are elevated as a cause, consequence or otherwise observed in the disease or condition. Elevated HA expression can occur in a tissue, cell, or body fluid (e.g. tumor tissue or tumor-associated tissue, blood, or interstitial space) compared to a control, e.g. another tissue, cell or body fluid or a normal tissue, cell or body fluid, for example, a tissue, cell or body fluid that is analogous to the sample being tested, but isolated from a different subject, such as a subject that is normal (i.e., does not have a disease or condition, or does not have the type of disease or condition that the subject being tested has), for example, a subject that does not have a hyaluronan-associated disease or condition. In some cases, hyaluronan-associated diseases and conditions are associated with increased interstitial fluid pressure, decreased vascular volume, and/or increased water content in a tissue, such as a tumor.

[0362] Exemplary hyaluronan-associated diseases and conditions include, but are not limited to, hyaluronan-rich cancers, for example, tumors, including solid tumors such as late-stage cancers, metastatic cancers, undifferentiated cancers, ovarian cancer, in situ carcinoma (ISC), squamous cell carcinoma (SCC), prostate cancer, pancreatic cancer, non-small cell lung cancer, breast cancer, colon cancer and other cancers. Also exemplary of hyaluronan-associated diseases and conditions are diseases that are associated with elevated interstitial fluid pressure, such as diseases associated with disc pressure, and edema, for example, edema caused by organ transplant, stroke, brain trauma or other injury. Exemplary hyaluronan-associated diseases and conditions include diseases and conditions associated with elevated interstitial fluid pressure, decreased vascular volume, and/or increased water content in a tissue, including cancers, disc pressure and edema. Typically, the hyaluronan-associated disease or condition is associated with increased HA expression, for example, in a diseased tissue, for example, a tumor.

[0363] HA is secreted in excessive amounts into the interstitium in some cancers, such as pancreatic cancer, to create high internal pressures that can collapse local blood vessels and prevent cancer-killing drugs from getting in. Therefore, subjects whose tumors have high amounts of HA tend to have a poor prognosis. Anti-hyaluronan agents, such as a hyaluronidase, for example the recombinant human hyaluronidase PH20 or its pegylated form (PEGPH20), can degrade intratumoral HA. The subsequent decrease in fluid pressures can improve blood flow, allowing better drug delivery to the tumor.

[0364] Accordingly, it is important and of interest to select subjects with a hyaluronan associated disease or condition and having increased HA expression in a diseased tissue, such as “high HA” tumors in certain cancers, for whom a treatment regimen that includes administration of an anti-hyaluronan agent will be beneficial, as assessed by one or more increased survival outcomes (e.g., PFS, ORR and OS) compared to a treatment regimen that does not include an anti-hyaluronan agent. An affinity histochemistry based companion diagnostic test developed by Roche Ventana showed that patients having “high HA” tumors receiving a treatment that included administration of an anti-hyaluronan agent, PEGPH20, along with a tumor-targeted taxane, nab-paclitaxel, and a nucleoside analog, gemcitabine, showed significant improvements in PFS and ORR and a trend toward improved OS. Affinity histochemistry based methods however have stringent requirements regarding methods of tissue collection from tumor lesions. A significant number of subjects who might benefit from treatment with an anti-hyaluronan agent, such as PEGPH20, are not so identified due to the unavailability of tumor tissue samples that meet the requirements of the affinity histochemistry based assay. Alternatives to tissue-based biomarkers, such as liquid biopsies, can provide a more widespread and efficient alternative for selecting subjects who can benefit from treatment with an anti-hyaluronan agent.

[0365] HA, along with collagens and proteoglycans, are major constituents of the extracellular matrix (ECM). During pathological events, ECM turnover, i.e., the balance between the formation and the degradation of the ECM, is disturbed, leading to an altered composition of the ECM. The changes in collagen/proteoglycan turnover, which can be measured as degradation products in samples such as blood, plasma, serum, urine and other liquids from a subject, often mirror the effects of HA turnover because several of the collagens and proteoglycans of the ECM, or their degradation products, interact with HA and/or parallel the changes in HA in relation to pathological events such as tumor progression. These degradation products therefore can serve as liquid biomarkers for diagnosing/monitoring pathological events and selecting subjects for treatment with an anti-hyaluronan agent based on their level(s) or relative level(s) of such biomarkers.

[0366] An affinity histochemistry-based companion diagnostic test developed by Roche Ventana has been used to measure tumor HA levels to select subjects with high levels for cancer therapy that includes PH20 (or PEGPH20). This test, however, has somewhat stringent requirements for tissue collection methods from tumor lesions, and requires invasive procedures. Because of these limitations, the eligibility for treatment with a hyaluronidase such as PH20 can be to determine due to the lack of suitable tumor tissue availability. Provided herein is an alternative to biopsy tissue-based procedures that can provide a more widely applicable and efficient alternative for selecting subjects for treatment that includes a hyaluronidase, such as PH20. Provided herein is an alternative to methods that require tumor biopsies. The methods and uses herein can be performed using body fluid samples, such as serum, plasma, urine or saliva.

[0367] 2. Extracellular Matrix (ECM) Overview

[0368] The ECM is a supramolecular structure with the ability to form aggregates of proteins, thus forming a dynamic scaffold linking cells together in a three dimensional network. This scaffold controls cell-matrix interactions and cell fate through up and down regulation of proteases. The ECM contains collagens, laminins, proteoglycans, and other glycoproteins in various amounts and combinations, thereby providing a variety of biological components which can be modified by proteases to produce scaffolds with specific functions to meet the needs of the individual tissue (see, e.g., International PCT publication No. WO2014/170312). Collagen Types I and III are the major structural proteins in the human body.

[0369] Remodeling of the ECM plays an important role in the pathogenesis of various diseases as altered components and non-coded modifications of the ECM leads to tissue stiffness and changes in the signaling potential of the intact ECM and fragments thereof (see, e.g., Karsdal et al., Assay Drug Dev. Technol., 11(2):70-92 (2013), and references cited therein). ECM remodeling is an important prerequisite for tissue function and repair, and is tightly controlled by the enzymes responsible for the synthesis and degradation of the ECM. During pathological events, the balance between the formation and the degradation of the ECM is disturbed, leading to an altered composition of the ECM (Ingber, Semin. Cancer Biol., 18(5):356-364 (2008); Schuppan et al., Semin. Liver Dis., 21(3):351-372 (2001)). Such an alteration results in altered tissue function. Among the components influencing/altering tissue function in diseased states are several whose effects parallel those observed when HA levels are abnormally high. Such components include the following:

[0370] Type III collagen is mainly present in association with Type I collagen and is an important component of the interstitial tissues of the lung, liver, dermis, spleen, and vessels. Type III collagen is a homotrimer consisting of three α1(III) chains. A characteristic feature of Type III collagen is that it is correlated to extensibility of tissues, and that it may contribute to elasticity, a property that is uniquely connected to this type of collagen (Kadler et al., Biochem. J., 316 (Pt 1):1-11 (1996)). Type III collagen has been associated with various fibrotic diseases (Barascuk et al., Clin. Biochem., 44(10-11):900-906 (2011); Vassiliadis et al., Biomark Insights, 6:49-58 (2011); Barascuk et al., Clin. Biochem., 43:899-904 (2010); Attallah et al., J. Immunoassay Immunochem., 28:155-168 (2007)).

[0371] During normal tissue homeostasis, the ECM turnover is tightly controlled. Old and damaged collagens are degraded and replaced with new proteins (Karsdal et al., Assay Drug Dev. Technol., 11(2):70-92 (2013). While the basic structure and composition of the ECM are similar across different tissues, variations in components, such as the ratio between ECM formation and degradation, can contribute to variations between healthy and diseased tissues, leading to desmoplasia (tumor fibrosis) (Karsdal et al., Assay Drug Dev. Technol., 11(2):70-92 (2013); Bonnans et al., Nat. Rev. Mol. Cell. Biol., 15:786-801 (2014)). Desmoplasia is a hallmark of pancreatic cancer. Interstitial collagen (e.g. Type III collagen) formation, deposition and degradation reflect different desmoplastic events. These events can be controlled by regulation of Type III collagen in a manner that is similar to regulation of the abundance of HA in the ECM, i.e., regulation by the local-regional balance between HA/collagen synthase activity and proteolytic degradation of these proteins.

[0372] The full length sequence of type III collagen is set forth in SEQ ID NO:227.

[0373] Type VI collagen is a heterotrimeric molecule with the isoform α1α2α3(VI) and contains a short triple helix flanked by two extended globular domains, and it is expressed, albeit variably, in virtually all tissues. The primary fibrils are arranged in overlapping dimers in an antiparallel manner and form parallel tetramers that are stabilized by intermolecular disulfide bonds. They aggregate to form filaments and an independent microfibrillar network. Type VI collagen molecules have a uniquely beaded appearance and interact with several ECM components such as Type I collagen and fibronectin (Engvall et al., J. Cell Biol., 102:703-710 (1986)).

[0374] Type VI collagen induces epithelial-mesenchymal transition that is correlated to increased synthesis of HA, supporting a parallel role of these molecules in tumor progression (Karousou et al., Biomed. Res. Int. 2014, doi:10.1155/2014/606458 (2014)). Further, Type VI collagen promotes chemotherapy resistance (Chen et al., Trends Mol. Med., 19:410-417 (2013)).

[0375] The full length sequence of type VI collagen is set forth in SEQ ID NO:241. Versican is a large interstitial chondroitin sulfate proteoglycan. It is present in many tissues, and it is one of the principal ECM components of normal blood vessels where it influences the assembly of ECM and controls elastic fiber fibrillogenesis (Wight et al. (2004) Circ. Res. 94:1158-1167). It is present in the intima and adventitia of most arteries and veins, and it is synthesized by vascular smooth muscle cells as well as endothelial cells, myofibroblasts, and macrophages (Asplund et al. (2011) Atherosclerosis, 215:77-81).

[0376] Versican interacts with hyaluronan and link protein to form high molecular weight stable aggregates. These complexes create a reversibly compressive compartment and provide a swelling pressure within the ECM that is compensated by collagen and elastic fibers. Increased levels of versican have been observed in atherosclerosis and restenosis, implying that this proteoglycan is a component of developing lesions and contributes to their progression in atherosclerosis and restenosis (Wight et al. (2004) Circ. Res. 94:1158-1167).

[0377] Versican binds to HA via its N-terminal region. Diseases such as pancreatic cancer are associated with a disproportionate increase of Versican, with a concurrent increase of HA.

[0378] The full length sequence of Versican is set forth in SEQ ID NO:243.

[0379] Type VIII collagen is a component of certain specialized extracellular matrices, several of which are derived from the neural crest. The NC1 domain of Type VIII collagen (alpha 1) is called vastatin. Type VIII collagen/vastatin play a role in remodeling of the arteries and in angiogenesis; vastatin is an endogenous anti-angiogenesis peptide. HA modulates tumor angiogenesis and could parallel the effects mediated by Vastatin.

[0380] The full length sequence of type VIII collagen is set forth in SEQ ID NO:242.

[0381] 3. Liquid Biomarkers (Neo-Epitopes) of ECM Remodeling

[0382] During pathological remodeling of the ECM, excessive levels of tissue- and pathology-specific turnover products, including polypeptides that are degradation fragments of ECM components or polypeptides that are markers of ECM component formation, are released into the circulation. Several of these products have been identified as markers for cancer as well as fibrotic and other pathological conditions. These products contain unique “neo-epitope” sequences that are present in the product but not in the full length protein or longer polypeptide fragments. Neo-epitopes derived from ECM markers whose roles/effects parallel or are otherwise related to the effects of HA in pathological conditions can serve as liquid biomarkers for hyaluronan associated disorders and conditions. These biomarkers, additionally, could be prognostic and/or predictive markers for assigning optimally beneficial treatment regimens to subjects. Among the circulating neo-epitopes are the following:

[0383] VCANM

[0384] One example of a protein peptide liquid biomarker of the ECM is MMP-8 or MMP-12 mediated degradation product of versican (VCANM). Increased levels of versican are associated with atherosclerosis and restenosis, implicating this proteoglycan as a specific component of developing lesions and contributing to the progression of atherosclerotic and restenotic lesions (Wight et al. (2004) Circ. Res. 94:1158-1167). Versican binds to and retains low density lipoproteins (LDL) and thus contributes to the pathological events leading to atherosclerotic tissue remodeling (Llorente-Cortes et al. (2002) Arterioscler. Thromb. Vasc. Biol. 22:387-393). The atherosclerotic artery is continuously being remodelled, releasing in the process a range of degradation products of ECM proteins, i.e., neo-epitopes, into the circulation. The generation of VCANM is associated with a high turnover rate of versican. (Genovese et al. PLoS One (2014) 9(10):e111134).

[0385] For example, the neo-epitope can be generated by MMP degradation, such as, for example, degradation by MMP-12 (Barascuk et al. (2013) Int. J. Clin. Exp. Med.; 6:174-84). VCANM is a marker of extracellular matrix remodeling. Versican is a prominent component of restenotic and atherosclerotic lesions, and elevated VCANM indicates increased remodelling at the plaque level (Barascuk et al. (2013) Int. J. Clin. Exp. Med. 2013; 6:174-84).

[0386] Any antibody selective for the VCANM neo-epitope can be used in the methods described herein. Such antibodies are known to one of skill in the art. In some examples, the antibody is selective for the peptide KTFGKMKPRY (SEQ ID NO:239); a monoclonal antibody specific for this peptide was developed for use in a competitive ELISA assay (Barascuk et al. (2013) Int. J. Clin. Exp. Med. 2013; 6:174-84).

[0387] Other cleavage products include those described in International Patent Publication No. WO 2010/115749, including those having the sequence LLASDAGLYR (SEQ ID NO:245), LATVGELQAAWR (SEQ ID NO:246) and ETTVLVAQNGNIK (SEQ ID NO:247). A binding partner can be one specifically reactive with a C-terminal or N-terminal neoepitope formed by cleavage of versican. Suitable binding partners can react with any of the following sequences at the N terminal of a peptide fragment of versican: LLASDA (SEQ ID NO:248), LATVGE (SEQ ID NO:249), ETTVLV (SEQ ID NO:250), ENQDAR (SEQ ID NO:251), NGFDQC (SEQ ID NO:252) and SLTVVK (SEQ ID NO:253). Suitable binding partners also can react with any of the following sequences at the C-terminus of a peptide fragment of versican: CDVMYG (SEQ ID NO:254), NGFDQC (SEQ ID NO:255), QNGINK (SEQ ID NO:256) and IGQDYK (SEQ ID NO:257).

[0388] Pro-C6

[0389] One example of a protein/peptide biomarker is C-terminal of the released C5 domain of Type VI collagen alpha3 chain (endotrophin). During formation of the microfilaments, the triple helical core of Type VI collagen is proteolytically released from its propeptide. Further cleavage of the C-terminal propeptide of the α3(VI) chain generates endotrophin (also known as Pro-C6; Lamande et al. (2006) J. Biol. Chem. 281:16607-14). Therefore, the level of the C-terminus of alpha3 chain can reflect the level of newly formed mature collagen Type VI (see, e.g., Sun et al. (2015) PLoS One, 10(12):e0144525).

[0390] Any method of measuring the amount of Pro-C6 known in the art can be used in the methods described herein. For example, Pro-C6 can be measured by ELISA targeting the C-terminus of alpha3 chain (see, e.g., Sun et al. (2015) PLoS One, 10(12):e0144525). For example, antibodies can be raised against amino acid fragments of the C-terminus of collagen type VI alpha3 chain. In one example, antibodies are raised against an immunogenic peptide having the sequence KPGVISVMGT (SEQ ID NO:238). (see, e.g., Sun et al., (2015) PLoS One, 10(12):e0144525).

[0391] C8-C

[0392] One example of a protein/peptide biomarker is a C-terminal fragment of Type VIII collagen. Type VIII collagen is involved in angiogenesis and remodeling of arteries (see, e.g., Hansen et al. (2016) Clin. Biochem., 49(12):903-908). Type VIII collagen is synthesized by aortic and corneal endothelial cells, as well as by pulmonary artery endothelial cells and microvascular endothelial cells. The C8-C fragment can have the sequence SFSGYLLYPM (SEQ ID NO:240). A monoclonal antibody against this neo-epitope has been prepared and used in a competitive ELISA assay (see, e.g., Hansen et al. (2016) Clin. Biochem., 49(12):903-908).

[0393] C3M

[0394] C3M is a proteolytically revealed neo-epitope formed by MMP-mediated degradation of Type III collagen (see, e.g., Kehlet (2016) Sci. Rep., 6:30599). C3M is a biomarker of soft tissue turnover associated with inflammation (see, e.g., Bay-Jensen 1-7, Veidal et al. (2010) Liver Int. 30: 1293-1304; Vassiliadis et al. (2011) Biomark Insights 6: 49-58; and Vassiliadis et al. (2011) Biomarkers 16(5):426-433). C3M reflects interstitial matrix remodeling and measures degradation of Type III collagen (see, e.g., Kehlet et al. (2016) Sci Rep. 6:30599 and Genovese et al. (2016) Biomark Insights 11:77-84). C3M is formed by degradation of Type III collagen by matrix metalloprotease(s), such as, for example, MMP-2 and/or MMP-9 (Willumsen et al. (2017) Oncol Lett. 13(5):3774-3780).

[0395] C3M is formed by cleavage at position 610 of type III collagen (see, e.g., Genovese et al. (2016) Nephrol Dial Transplant. 31(3):472-9; Siebuhr et al. (2014) Osteoarthritis Cartilage 22(1):44-50. Thus, in some examples, the neo-epitope C3M comprises an amino acid sequence that includes KNGETGPQGP (SEQ ID NO:226) or that is KNGETGPQGP (SEQ ID NO:226). This sequence corresponds to amino acids 610-619 of type III collagen (Vassiliadis et al. (2011) Biomark Insights 6:49-58; Vassiliadis et al. (2011) BMC Dermatol. 11:6). Detection and quantitation of a polypeptide that includes the neo-epitope is assessed.

[0396] C3M can be measured, for example, by binding to an immunological binding partner, such as an antibody, that is specific for the neo-epitope. Examples of antibodies for use in the methods described herein include antibodies that recognize MMP cleaved type III collagen and not intact type III collagen, other collagens or the products of other protease-mediated collagen degradation.

[0397] Antibodies for use in the methods provided herein can be prepared by methods known in the art and described herein. In some examples, monoclonal antibodies are produced by immunization with peptides that include or have the sequence of the neo-epitope. In some examples, peptides used for monoclonal antibody production have the amino acid sequence KNGETGPQGP (SEQ ID NO:226). The methods can use the monoclonal antibodies or antigen-binding fragments thereof.

[0398] Examples of antibodies include, for example, MAb-C3M-610T1, NB51-G12, NB51-134 and NB51-278-32 (see, e.g., Bay-Jensen et al. PLoS One 8(1):E54504; Bay-Jensen et al. (2016) Arthritis Res Ther. 18:13; Bay-Jensen et al. (2104) Semin Arthritis Rheum. 43(4):470-8; Maijer et al. (2016) PLoS One March 28; 11(3):e0149329; Genovese et al. (2016) Nephrol Dial Transplant. 31(3):472-9; Barascuk et al. (2013) Int. J. Clin. Exp. Med. 2013; 6:174-84; Maijer et al. (2016) PLoS One 11(3):e0149329; Papasotiriou et al. (2015) Nephrol Dial Transplant. 30(7):1112-21; see, also, U.S. Pat. Nos. 9,206,464 and 9,606,130).

[0399] Materials for a C3M competitive ELISA assay that includes the monoclonal antibody NB51-278-32 are commercially available as a kit sold by Nordic Biosciences, Denmark (“C3M ELISA,” Catalog No. 1200-01).

[0400] PRO-C3

[0401] Fragments of Type III collagen that are produced in the formation of collagen type III but not produced in the degradation of collagen type III, include a released N-terminal pro-peptide of Type III collagen (PIIINP; Pro-C3). During fibrillar assembly, the N-terminal propeptide of Type III collagen is cleaved off by specific N-proteases prior to incorporation of the mature collagen in the extracellular matrix (ECM) and released in the ECM and into circulation. The propeptide molecule has three identical a chains with a total molecular weight of 42 kDa. Removal of the propeptide is sometimes incomplete, leaving the propeptide attached to the molecule resulting in thin fibrils with abnormal cross-links and thereby prone to rapid metabolic turnover (Nielsen et al., Am. J. Transl. Res. 2013 Apr. 19; 5(3):303-15; Niemela et al., (1985) Biochem. J., 1985; 232: 145-150; Wang et al., (2006) Biochem. J., 398:515-519). The presence of N-terminal collagen III pro-peptide (Pro-C3) released during collagen formation and maturation correlates with formation of Type III collagen (see, e.g., Kehlet et al. (2016) Sci. Rep., 6:30599).

[0402] The C-terminal amino acid sequence CPTGPQNYSP (SEQ ID NO:216) in human Type III collagen is formed by the N-protease cleavage of human Type III collagen from intact procollagen type III at the Pro-Gln bond between amino acids P153-Q154 in human type III collagen. Measurement of this neo-epitope in a sample reflects type III collagen. The polypeptide PTGPQNYSP (SEQ ID NO:229) (see, e.g., Siebuhr et al., (2012) J. Transl. Med., 10:195) has been used to raise antibodies specific for the neo-epitope, Pro-C3.

[0403] Materials for a Pro-C3 competitive ELISA assay that includes the monoclonal antibody NB61N-62 are commercially available as a kit sold by Nordic Biosciences, Denmark (“Pro-C3 ELISA,” Catalog No. 1700). Other kits and antibodies also are commercially available for detecting Pro-C3. For example, a PIIINP (i.e., Pro-C3) competitive radioimmunoassay kit is sold by Pacific Biomarkers, Seattle, Wash., USA. A polyclonal antibody for detecting Pro-C3 is commercially available from MilliporeSigma (Rockville, Md., USA; Catlog No. AB764P).

[0404] C3M/PRO-C3

[0405] HA disruption can interfere with the assembly of collagen, of which Type III collagen is a major component of the ECM. Therefore, a ratio representative of Type III collagen turnover, namely the ratio of levels of a marker correlated to Type III collagen degradation (C3M) to levels of a marker correlated with Type III collagen formation (Pro-C3) could be linked to the impact of HA on the severity of desmoplasia in cancers, such as pancreatic cancer. Moreover, a misbalance in the ratio between Type III collagen degradation (C3M) and formation (Pro-C3) has been correlated to Crohn's disease.

[0406] 4. Selection of Subjects for Treatment with an Anti-Hyaluronan Agent

[0407] Provided herein are methods for the selection of subjects who will benefit from a treatment regimen that includes an anti-hyaluronan agent. In the methods provided herein, a subject is selected as a candidate for therapy with an anti-hyaluronan agent if the amount of a biomarker is determined to be about, at or above a predetermined threshold level. The biomarkers VCANM, Pro-C3, Pro-C6, C3M, Pro-C8 and the C3M/Pro-C3 ratio were assessed for their prognostic and predictive value for identifying subjects projected to have improved prognosis or predicted to have an increased survival benefit when treated with an anti-hyaluronan agent.

[0408] a. Detection and Quantitation of Biomarkers

[0409] The biomarkers can be detected and/or quantitated using any binding assay known to one of skill in the art including, but not limited to, solid phase binding assays (e.g. enzyme linked immunosorbent assay (ELISA)), radioimmunoassay (MA), immunoradiometric assay, fluorescence assay, chemiluminescent assay, bioluminescent assay, western blot and histochemistry methods, such as immunohistochemistry (IHC) or pseudo immunohistochemistry using a non-antibody binding agent. In solid phase binding assay methods, such as ELISA methods and radioimmunoassay methods, for example, the assay can be a sandwich format or a competitive inhibition format.

[0410] A biomarker value for the biomarkers described herein can be detected using any of a variety of known analytical methods. In one embodiment, a biomarker value is detected using a capture reagent. The capture reagent can be exposed to the biomarker in solution or can be exposed to the biomarker while the capture reagent is immobilized on a solid support. In other embodiments, the capture reagent contains a feature that is reactive with a secondary feature on a solid support. In these embodiments, the capture reagent can be exposed to the biomarker in solution, and the feature on the capture reagent can be used in conjunction with the secondary feature on the solid support to immobilize the biomarker on the solid support. The capture reagent is selected based on the type of analysis to be conducted. Capture reagents include but are not limited to aptamers, antibodies, adnectins, ankyrins, other antibody mimetics and other protein scaffolds, autoantibodies, chimeras, small molecules, an F(ab′)₂ fragment, a single chain antibody fragment, an Fv fragment, a single chain Fv fragment, a nucleic acid, a lectin, a ligand-binding receptor, affybodies, nanobodies, imprinted polymers, avimers, peptidomimetics, a hormone receptor, a cytokine receptor, and synthetic receptors, and modifications and fragments of these.

[0411] In some examples, a biomarker value is detected using a biomarker/capture reagent complex. In other examples, the biomarker value is derived from the biomarker/capture reagent complex and is detected indirectly, such as, for example, as a result of a reaction that is subsequent to the biomarker/capture reagent interaction, but is dependent on the formation of the biomarker/capture reagent complex.

[0412] In some examples, the biomarker value is detected directly from the biomarker in a biological sample.

[0413] In one example, the biomarkers can be detected using a multiplexed format that allows for the simultaneous detection of two or more biomarkers in a biological sample. In one embodiment of the multiplexed format, capture reagents are immobilized, directly or indirectly, covalently or non-covalently, in discrete locations on a solid support. In another embodiment, a multiplexed format can use discrete solid supports where each solid support has a unique capture reagent associated with that solid support, such as, for example quantum dots. In another embodiment, an individual device can be used for the detection of each one of multiple biomarkers to be detected in a biological sample. Individual devices can be configured to permit each biomarker in the biological sample to be processed simultaneously. For example, a microtiter plate can be used such that each well in the plate is used to uniquely analyze one of multiple biomarkers to be detected in a biological sample.

[0414] In one or more of the foregoing embodiments, a fluorescent tag can be used to label a component of the biomarker/capture complex to enable the detection of the biomarker value. In various embodiments, the fluorescent label can be conjugated to a capture reagent specific to any of the biomarkers described herein using known techniques, and the fluorescent label can then be used to detect the corresponding biomarker value. Suitable fluorescent labels include rare earth chelates, fluorescein and its derivatives, rhodamine and its derivatives, dansyl, allophycocyanin, PBXL-3, Qdot 605, Lissamine, phycoerythrin, Texas Red, and other such compounds.

[0415] In one embodiment, the fluorescent label is a fluorescent dye molecule. In some embodiments, the fluorescent dye molecule includes at least one substituted indolium ring system in which the substituent on the 3-carbon of the indolium ring contains a chemically reactive group or a conjugated substance. In some embodiments, the dye molecule includes an AlexFluor molecule, such as, for example, AlexaFluor 488, AlexaFluor 532, AlexaFluor 647, AlexaFluor 680, or AlexaFluor 700. In other embodiments, the dye molecule includes a first type and a second type of dye molecule, such as, e.g., two different AlexaFluor molecules. In other embodiments, the dye molecule includes a first type and a second type of dye molecule, and the two dye molecules have different emission spectra.

[0416] Fluorescence can be measured with a variety of instrumentation compatible with a wide range of assay formats. For example, spectrofluorimeters have been designed to analyze microtiter plates, microscope slides, printed arrays, cuvettes, etc.

[0417] In one or more of the foregoing embodiments, a chemiluminescence tag can optionally be used to label a component of the biomarker/capture complex to enable the detection of a biomarker value. Suitable chemiluminescent materials include any of oxalyl chloride, Rodamin 6G, Ru(bipy)32+, TMAE (tetrakis(dimethylamino)ethylene), Pyrogallol (1,2,3-trihydroxibenzene), Lucigenin, peroxyoxalates, Aryl oxalates, Acridinium esters, dioxetanes, and others.

[0418] In yet other embodiments, the detection method includes an enzyme/substrate combination that generates a detectable signal that corresponds to the biomarker value. Generally, the enzyme catalyzes a chemical alteration of the chromogenic substrate which can be measured using various techniques, including spectrophotometry, fluorescence, and chemiluminescence. Suitable enzymes include, for example, luciferases, luciferin, malate dehydrogenase, urease, horseradish peroxidase (HRPO), alkaline phosphatase, beta-galactosidase, glucoamylase, lysozyme, glucose oxidase, galactose oxidase, glucose-6-phosphate dehydrogenase, uricase, xanthine oxidase, lactoperoxidase, and microperoxidase, and the like.

[0419] In yet other embodiments, the detection method can be a combination of fluorescence, chemiluminescence, radionuclide or enzyme/substrate combinations that generates multimodal signaling.

[0420] b. Classification of Subjects

[0421] The levels of biomarkers measured according to the methods described herein can be used to classify a subject having a hyaluronan associated disease or condition, such as cancer, as one who will benefit from a treatment regimen that includes an anti-hyaluronan agent, or as one who will not benefit from such treatment, by comparing the levels of biomarkers of the subject with predetermined cutoff values for the biomarkers.

[0422] The predetermined cutoff value can be based on prior measurements or knowledge of the means of the marker levels for individuals in two or more groups, or different variances in the two or more groups, or a combination of both, that have the same condition as the subject of interest and are subjected to treatment regimens that either include or do not include an anti-hyaluronan agent, and the selection of a threshold value that provides the optimum differentiation between “responders” (those who will benefit from treatment with an anti-hyaluronan agent) and “non-responders” (those who will not benefit from treatment with an anti-hyaluronan agent).

[0423] For example, such a prior study can include a group of individuals having a hyaluronan associated condition, such as pancreatic cancer: Group 1, whose treatment includes administering an anti-hyaluronan agent, such as PEGPH20, and Group 2, whose treatment includes all the agents administered to Group 1 with the exception of PEGPH20. Within each group, individuals can be classified as having either a “high” biomarker level (level≥threshold) or a “low” biomarker level (level<threshold) based on various thresholds.

[0424] There are a number of approaches to determining a cutoff biomarker level or ratio (e.g., C3M/Pro-C3 ratio), as discussed and demonstrated below. As exemplified in Examples 15 and 16, a cutoff value can be selected so that when a subject's biomarker level is equal to or greater than the cutoff, the subject is selected as one who will benefit from a treatment regimen that includes administration of an anti-hyaluronan agent, such as a pegylated soluble hyaluronidase. Examples 15 and 16 employ different analytical methods, but reach the same results. Example 15 describes selection of the cutoff value with the Likelihood Ratio test, and, using the same data, Example 16 uses the Log Rank test. Using either a Log Rank or Likelihood Ratio test results in a significant p-value at the cutoff.

[0425] The statistical ranking of a biomarker level, or ratio of the levels of two biomarkers in a subject, relative to a cutoff value, can be based on a percentile scoring of the biomarker level or ratio. For example, subjects can be identified as those who will benefit from treatment with an anti-hyaluronan agent if their biomarker level or ratio (e.g., C3M/Pro-C3 ratio) is in the top 0.5, 1, 2, 3, 4, 5, 10, 15, 20, 25, 30, 35, 40, 45, 50, 55, 60, 65th or more percentile. As discussed below, while a cutoff ratio in favor of selecting a smaller fraction of subjects for treatment with an anti-hyaluronan agent (e.g., top 90th percentile of subjects) can result in a higher increase in median survival benefit for that small fraction (10%) of subjects from a treatment regimen that includes the anti-hyaluronan agent (compared to a regimen that does not include the anti-hyaluronan agent), the selection of a cutoff level or ratio that includes a larger fraction of subjects (e.g., 50th or 75th percentile) can nonetheless also provide an increase in median survival benefit which, albeit smaller than the median benefit realized for the 90th percentile group, can benefit more subjects. The cutoff ratio is selected based on an optimal statistical balance between the number of subjects who can benefit from a treatment regimen and the amount of the median survival benefit (e.g., OS, ORR and/or PFS) measured in the subjects.

[0426] For example, as described in Example 15, a cutoff ratio of 0.38 provides the benefit of treatment with an anti-hyaluronan agent, i.e., PEGPH20, to 63% of the subjects in the population (i.e., subjects whose C3M/Pro-C3 ratio is ≥0.38), as measured by a median increase in OS of about 2.3 months relative to subjects satisfying the same cutoff threshold who are not administered PEGPH20. Further, as described in Example 15, a cutoff ratio of 0.45 provides the benefit of treatment with an anti-hyaluronan agent, i.e., PEGPH20, to 55% of the subjects in the population (i.e., subjects whose C3M/Pro-C3 ratio is ≥0.45), as measured by a median increase in PFS of about 2.6 months relative to subjects satisfying the same cutoff threshold who are not administered PEGPH20. When a higher cutoff ratio is used to select subjects for the benefit of treatment with PEGPH20, e.g., the ROC or 50th percentile cutoff ratios as described in Example 14 (see, e.g., ROC and results for the Stage 2 validation cohort), a smaller fraction of subjects are selected for the benefit of treatment but the median survival benefit to the selected subjects (OS or PFS) is increased, e.g., to more than 5 months. Depending on factors including, e.g., the type of cancer or other hyaluronan-associated condition to be treated, the subject/subject population to be treated (age, gender, preexisting conditions, etc.), a cutoff ratio can be selected to provide a desired survival benefit for a desired fraction of the subject population. The benefit can be larger in magnitude if the cutoff ratio selects for a smaller fraction of the subject population to receive the benefit of a treatment that includes, e.g., an anti-hyaluronan agent (i.e., most of the subjects in the small selected population will show a benefit received from treatment with the anti-hyaluronan agent, resulting in a larger value of the median survival benefit) while the selection of a larger subject population (i.e., using a smaller threshold cutoff ratio) will benefit a larger fraction of the subject population but the median survival benefit will be smaller (because more subjects in the larger selected population are likely to receive a lower to no benefit from including the anti-hyaluronan agent in the treatment regimen).

[0427] In examples of the methods provided herein, the cutoff ratio of the levels of biomarkers indicative of Type III collagen degradation/Type III collagen formation is the 50th percentile, also referred to herein as median (50th percentile) (50% of the subjects have a biomarker level≥cutoff value). In other examples, the cutoff ratio of the levels of biomarkers indicative of Type III collagen degradation/Type III collagen formation is the 75th percentile, also referred to as upper quartile (25% of the subjects have a biomarker level≥cutoff value). In other examples, the cutoff ratio of the levels of biomarkers indicative of Type III collagen degradation/Type III collagen formation is the 75th percentile, also referred to as upper quartile (25% of the subjects have a biomarker level≥cutoff value). In some examples, the cutoff ratio of the levels of biomarkers indicative of Type III collagen degradation/Type III collagen formation is the 25th percentile, also referred to as lower quartile (75% of the subjects have a biomarker level≥cutoff value). A cutoff value also can be a median value, i.e., the value (e.g., ratio) that is higher than that of 50% of the subjects and lower than that of 50% of the subjects.

[0428] A cutoff value also can be determined by obtaining a receiver/relative operating characteristic curve (ROC curve) created by plotting the true positive rate (TPR, or sensitivity) against the false positive rate (FPR) using various cutoffs. A patient whose biomarker level is equal or above a cutoff is classified as a responder whereas the one whose biomarker level below the cutoff is classified as a non-responder. The TPR or Sensitivity represents the probability that a subject identified as responder is in actuality a responder (e.g., a complete or partial responder to treatment with PAG or AG, as defined by RECIST). Specificity represents the probability that a subject identified as a non-responder is in actuality a non-responder (stable or progressed disease as defined by RECIST). The FPR is defined as 1-Specificity. The optimal cutoff is determined by the cutoff yielding the maximum value of J (Youden's index)=Sensitivity+Specificity−1, and represents the level of biomarker (e.g., ratio of C3M/Pro-C3) that is optimal in its differentiating ability when equal weight is given to Sensitivity and Specificity. A statistical analysis, such as a univariate Cox regression analysis, can be performed to verify a statistically significant correlation between individuals classified as “high” or “low” for the various thresholds, and the increased benefit seen when administered treatment with an anti-hyaluronan agent compared to treatment without an anti-hyaluronan agent.

[0429] A cutoff ratio also can be selected based on the fraction of the subject population targeted to receive a median survival benefit (as measured by OS, ORR or PFS). For example, as described in Example 15, the selection of cutoff ratios lower than the median (50th percentile), i.e., 0.38 and 0.45, provides a median survival benefit to a larger fraction of the subject population (63% and 55%, respectively), although the magnitude of the benefit (number of months of increased OS or PFS, respectively) is smaller than those measured when the cutoff ratio for the selection of subjects is larger, such as the ratios described in Example 14.

[0430] Using such studies/measurements, the levels of these biomarkers can be used to classify an unknown subject as a responder or a non-responder, based on the level(s) of biomarker(s) of the unknown subject. The assignment of a sample into one of two groups is known as classification, and the procedure used to accomplish this assignment is known as a classifier or a classification method. Classification methods also are referred to as scoring methods. There are many classification methods that can be used to construct a diagnostic classifier from a set of biomarker values. In general, classification methods are performed using supervised learning techniques, where a data set is collected using samples obtained from individuals within two distinct groups one wishes to distinguish. Since the class (group or population) to which each sample belongs is known in advance for each sample, the classification method can be trained to give the desired classification response. It also is possible to use unsupervised learning techniques to produce a diagnostic classifier. Common approaches for developing diagnostic classifiers include decision trees; bagging, boosting, forests and random forests; rule inference based learning; Parzen Windows; linear models; logistic; neural network methods; unsupervised clustering; K-means; hierarchical ascending/descending; semi-supervised learning; prototype methods; nearest neighbor; kernel density estimation; support vector machines; hidden Markov models; Boltzmann Learning.

[0431] Using such classification methods, it was found that of the liquid ECM biomarkers that were studied (VCANM, Pro-C6, C8-C, C3M, Pro-C3 and C3M/Pro-C3), the C3M/Pro-C3 ratio was predictive for subjects who will benefit from treatment with an anti-hyaluronan agent.

[0432] c. Determining the Cutoff Value of a Biomarker or a Ratio of Biomarkers

[0433] Survival analysis methodologies, as known and as exemplified herein, are used to identify subjects having a biomarker level, or a ratio of levels of biomarkers (e.g., C3M/Pro-C3) who can benefit from a treatment regimen, e.g., treatment with an anti-hyaluronan agent. The methods used to assess the value of the assay (i.e., determining the C3M/Pro-C3 ratio) to subjects being considered for a treatment regimen (i.e., whether the assay will prove useful for identifying subjects who will benefit from the treatment prior to administering such treatment) incorporate the concepts of “statistical significance” and “how a treatment effect satisfies a clinical benefit.” In particular, the predictive value of a biomarker or biomarker ratio cutoff, as measured in a group of subjects, is determined by an algorithm. The methods provided herein are exemplary; other methods can be used to establish the value of a biomarker assay for selecting subjects who will benefit from the results of the assay (i.e., whether it is useful for determining the type of treatment regimen, e.g., with or without an anti-hyaluronan agent, that should be administered to the subject).

[0434] The significance of the effects of a treatment regimen, i.e., whether the effects of a treatment provide a clinically meaningful benefit, and the significance of meeting that benefit, can be assessed with data from clinical trial endpoints using survival analysis methods (Guidance for Industry Clinical Trial Endpoints for the Approval of Cancer Drugs and Biologics, 2007, FDA CDER and CBER). Examples of established clinical trial endpoints such as OS, PFS, and ORR are described in Example 9.

[0435] The significance of the effects of a treatment/treatment regimen can be calculated using a Kaplan-Meier Log Rank (see, e.g., Example 16) function; alternatively, it can be determined using a Likelihood Ratio test (see, e.g., Example 15). A clinically meaningful benefit generally is assessed along with statistical significance because a significant p-value alone, without further context, often does not provide a good measure of evidence for a model or hypothesis (“The ASA's Statement on p-Values: Context, Process, and Purpose,” 2016).

[0436] One way to demonstrate the potential (or predicted) clinical benefit of an investigational biomarker or ratio of biomarkers is to show that its values at or beyond a specified cutoff can selectively enrich for a sub-population of subjects with the potential to respond beneficially to a first therapeutic regimen, e.g., a regimen that includes administration of an anti-hyaluronan agent, such as an hyaluronan degrading enzyme, such as a soluble hyaluronidase, when compared to a second treatment regimen, e.g., one that does not include an anti-hyaluronan agent but is otherwise identical. The relative fraction of all subjects identified by the biomarker cutoff for potential treatment using the first treatment regimen, F (Regimen 1) can be defined by Equation 1, as follows:

$$F ( Regimen 1 ) = \frac{Number of subjects with biomarker scores \geq cutoff}{Total number of subjects}$$

where F is the fraction of subjects with potential to treat (likely to benefit from treatment).

[0437] The Table below contains a summary of the definitions for statistical significance and clinical benefit. In the examples, biomarker cutoffs were optimized for meeting or exceeding clinical benefit in Log-Rank median survival difference and/or Hazard Ratio (HR, as described in Example 9, section A.5). Confidence intervals for clinical benefit had to be considered significant. Including these additional criteria ensures that there is less than a 5% Type I error; that is, the chance of declaring a significant result (in terms of hazard ratio and/or Kaplan-Meier median survival difference) when the true result is not significant. Confidence intervals were LOESS-fit with a smoothing parameter of 0.3 to aid in the assessment of the trend when benefit was no longer statistically significant, and were reported as such. The LOESS algorithm is a local regression using weighted linear least squares and a 2nd degree polynomial model. The LOESS values were calculated using the R library “ggplot2”, using the “geom_smooth” function (Software versions described in the second Table below).

[0438] The Statistical Significance Table below provides a summary of the definitions for statistical significance and clinical benefit (results shown in Example 16).

Statistical Significance Table

| | Statistical | Clinically Meaningful Benefit | | | Clinically Meaningful Benefit | | |
|---|---|---|---|---|---|---|---|
| | Significance | using HR | | | using KM Median Difference | | |
| End- | Log Rank P- | Proportional | Proportional | Loess-fit 95% | KM Median | KM Median | LOESS-fit |
| point | value upper | Hazard | Hazard | Confidence | Difference | Difference | Bootstrapped 95% |
| | limit | Ratio (Low | Ratio (Base | Interval | between Arms | between Arms | Confidence |
| | | Case) | Case) | Upper Limit | (PAG-AG, Low | (PAG-AG, Base | Interval |
| | | | | | Case) | Case) | Lower Limit |

[0439] In the examples herein, biomarker cutoffs were optimized for meeting or exceeding clinical benefit in the Likelihood Ratio test (Example 15) or the Log-Rank median survival difference (Example 16) and/or Hazard Ratio (HR, as described in Example 9). Confidence intervals for clinical benefit were considered for significance. Including these additional criteria ensures that there is less than a 5% Type I error; that is, the chance of declaring a significant result (in terms of hazard ratio and/or Kaplan-Meier median survival difference and/or Likelihood Ratio test) when the true result is not significant. Confidence intervals were LOESS-fit with a smoothing parameter of 0.3 to aid in the assessment of the trend when benefit was no longer statistically significant, and were reported as such. The LOESS algorithm is a local regression using weighted linear least squares and a 2nd degree polynomial model. The LOESS values were calculated using the R library “ggplot2”, using the “geom_smooth” function (see Software Versions Table below).

[0440] Example 9 describes the subject population used for testing cutoff values of the C3M/Pro-C3 biomarker ratio that are useful in predicting whether a treatment regimen, such as one that includes administration of an anti-hyaluronan agent, will provide an increased survival benefit for a fraction of the subjects. An exemplary testing is described in Example 15. All calculations were run in R programming language (R: A language and environment for statistical computing, R Core Team, R Foundation for Statistical Computing, Vienna, Austria, 2017, URL R-project.org) using R libraries common to survival analysis (listed in the Software Versions Table below).

Software Versions Table

| R Software and Libraries | Version |
|---|---|
| R | 3.4.3 |
| R Studio | 1.1.383 |
| ggplot2 | 2.2.1 |
| grid (Part of base package in R 3.4.3) | 3.4.3 |
| Hmisc | 4.0-3 |
| Plyr | 1.8.4 |
| RColorBrewer | 1.1-2 |
| Readxl | 1.0.0 |
| Survival | 2.41-3 |
| survminer | 0.4.1 |
| survMisc | 0.5.4 |
| Writexl | 0.2 |

[0441] d. Measurement of C3M/Pro-C3 Ratio

[0442] It is shown herein, that the ratio of the biomarkers associated with Type III collagen degradation and Type III collagen formation, determined from a body fluid sample from a subject having a hyaluronan associated disease or condition, such as cancer, has predictive value for selecting subjects who are likely to experience a greater benefit from combination therapy that includes an anti-hyaluronan agent, such as a polymer-conjugated soluble hyaluronidase, compared to therapy that does not include the polymer-conjugated soluble hyaluronidase. An exemplary biomarker associated with Type III collagen degradation is C3M; and an exemplary biomarker associated with Type III collagen formation is Pro-C3. Each are a different fragment of Type III collagen, and each contains a neo-epitope unique to the particular fragment that is not present in other biomarker fragments nor in full length Type III collagen or longer polypeptides. The C3M and Pro-C3 markers can be detected and quantitated using standard immunoassays with antibodies specific for each biomarker, as described herein. Various immunoassays and antibodies for detection of these biomarkers are well known in the art.

[0443] For example, the C3M/Pro-C3 ratio can identify subjects for whom treatment of pancreatic ductal adenocarcinoma (PDAC) with polymer-conjugated soluble hyaluronidase, tumor-targeted taxane and a chemotherapeutic agent, such as gemcitabine, will have greater benefit than treatment with just the tumor-targeted taxane and chemotherapeutic agent, such as gemicitabine. Treatment with nab-paclitaxel and gemcitabine is the standard of care treatment for PDAC. Certain subjects benefit from the combination therapy that includes polymer-conjugated soluble hyaluronidase. It is shown herein that subject with PDAC that have a C3M/Pro-C3 ratio that is about, at or greater than a predetermined threshold value can benefit from a treatment regimen that includes an anti-hyaluronan agent, such as a polymer-conjugated hyaluronidase, while those whose C3M/Pro-C3 is less than the threshold do not show a statistically significant increased benefit compared to the standard of care regimen.

[0444] The benefit for subjects having a “high” C3M/Pro-C3 ratio (level≥threshold) can be measured by several survival outcomes:

[0445] Progression Free Survival (PFS), measured as the time at which treatment is begun until the time at which the disease has progressed or death due to disease progression has occurred. In general, the increased benefit can be anywhere from about or at 1 week to about or at 2 weeks, 3 weeks, 4 weeks, 5 weeks, 6 weeks, 2 months, 2.5 months, 3 months, 3.5 months, 4 months, 4.5 months, 5 months, 5.5 months, 6 months, 6.5 months, 7 months, 7.5 months, 8 months, 8.5 months, 9 months or longer. In examples, the increased benefit can be about 1 week, 2 weeks, 3 weeks, 4 weeks, 5 weeks, 6 weeks, 2 months, 2.5 months, 3 months, 3.5 months, 4 months, 4.5 months, 5 months, 5.5 months, 6 months, 6.5 months, 7 months, 7.5 months, 8 months, 8.5 months, 9 months or longer.

[0446] Overall/Objective Response Rate (ORR), measured as an improved response rate to treatment that includes administering an anti-hyaluronan agent compared to treatment without the agent. In general, the increased response rate can be from about or at 5% to about or at 6, 7, 8, 9, 10, 15, 20, 25, 30, 35, 40, 45, 50, 55, 65, 65, 70, 75, 80, 85 or 90% or more. In some examples, the increased response rate can about 5% to about or at 6, 7, 8, 9, 10, 15, 20, 25, 30, 35, 40, 45, 50, 55, 65, 65, 70, 75, 80, 85 or 90% or more.

[0447] Overall Survival (OS), measured as the time when treatment is begun to the time of death from any cause. In general, the increased benefit can be anywhere from about or at 3 weeks, 4 weeks, 5 weeks, 6 weeks, 2 months, 2.5 months, 3 months, 3.5 months, 4 months, 4.5 months, 5 months, 5.5 months, 6 months, 6.5 months, 7 months, 7.5 months, 8 months, 8.5 months, 9 months, 10 months, 11 months, 12 months, 2 years, 2.5 years, 3 years, 3.5 years, 4 years, 4.5 years, 5 years or longer. In examples, the increased benefit can be about 3 weeks, 4 weeks, 5 weeks, 6 weeks, 2 months, 2.5 months, 3 months, 3.5 months, 4 months, 4.5 months, 5 months, 5.5 months, 6 months, 6.5 months, 7 months, 7.5 months, 8 months, 8.5 months, 9 months, 10 months, 11 months, 12 months, 2 years, 2.5 years, 3 years, 3.5 years, 4 years, 4.5 years, 5 years or longer.

[0448] It is shown herein, that subjects with “high” C3M/Pro-C3 ratios (greater than or equal to a threshold), such as those having a ratio greater than about or at least 0.25, 0.3, 0.35, 0.4, 0.45 or 0.5, will benefit from treatment that includes administering an anti-hyaluronan agent, such as PEGPH20. The threshold ratio can be, for example, at least or about 0.25, 0.3, 0.35, 0.4, 0.45, 0.5, 0.55, 0.6, 0.65, 0.7, 0.75, 0.8, 0.85 or 0.9, or between about or at 0.3, 0.4, 0.45 or 0.5 to about or at 0.6, 0.65, 0.7, 0.75 or 0.8 or between about or at 0.5, 0.55 or 0.6 to about or at 0.7, 0.75, 0.8, 0.85 or 0.9 or between about 0.7 to about 0.75, 0.8, 0.85 or 0.9. In some examples, the “high” C3M/Pro-C3 ratio selects for subjects in whom combination therapy that includes polymer-conjugated soluble hyaluronidase is likely to improve therapeutic outcome, as measured by one or more of PFS, ORR and OS. For example, it is shown herein, that statistically significant results were obtained for improved PFS, ORR and OS in subjects with “high” C3M/Pro-C3 ratios when treated with polymer-conjugated soluble hyaluronidase, such as PEGPH20, nab-paclitaxel and gemcitabine (PAG), compared to nab-paclitaxel and gemcitabine (AG). For subjects with PDAC, e.g., Stage IV PDAC, the threshold ratio identifying “high” C3M/Pro-C3 subjects who will benefit from treatment with a polymer-conjugated soluble hyaluronidase, such as PEGPH20, a tumor-targeted taxane, such as nab-paclitaxel, and a chemotherapeutic agent, such as gemcitabine, include:

[0449] A threshold value that is about or at least 0.25, 0.3, 0.35, 0.4 or 0.45;

[0450] A threshold value that is about or least 0.5, 0.55, 0.6, 0.65 or 0.7;

[0451] A threshold value that is about or at least 0.7, 0.75, 0.8 or 0.85; or

[0452] A threshold value that is about or at least 0.75, 0.8, 0.85 or 0.9.

[0453] In some examples, the threshold (cutoff) ratio is between about or at 0.3 to 0.45. In some examples, the threshold (cutoff) ratio is between about or at 0.5 to 0.55. In other examples, the threshold ratio is about or between about 0.65 to 0.75. In some examples, the threshold ratio is about or between about 0.75 to 0.85.

[0454] For practicing the methods of selection of subjects for treatment that includes administration of a soluble hyaluronidase, the ratio of C3M/Pro-C3 in a body fluid sample from a subject is determined. To do so the amount or relative amount of each biomarker is measured. Each marker is assessed by detecting binding to an antibody or antigen binding fragment, or other such binding partner. Assays include immunoassays.

[0455] In some examples of the methods described herein, the ratio of the amounts of two neo-epitopes described herein is measured by quantitating the amount of each biomarker in a body fluid sample, such as, for example, the ratio of the amount of C3M to the amount of Pro-C3 (PIIINP). The methods provided herein include methods of immunoassay that include contacting a biological sample containing one or more neoepitopes described herein, such as C3M and/or Pro-C3 with one or more immunological binding partners, such as a monoclonal antibody, that binds to the neoepitope(s), such as a monoclonal antibody as described herein, and determining the amount of binding of the antibody.

[0456] Generally, any assay format to detect the presence of the C3M and ProC3 polypeptides can be used. Such formats include, but are not limited to, immunoassays, in which the amount or relative amount of each of the polypeptides is assessed by binding to a binding partner that specifically binds to each polypeptide. Antibodies, including monoclonal antibodies can be used. It is routine to produce antibodies against any polypeptide. Immunoassay formats can be used in the methods described herein, including heterogeneous and homogeneous formats, sandwich assays, competition assays, enzyme linked assays and radio-immune assays. In some embodiments, the method of immunoassay is a competition assay or a sandwich assay. In some embodiments, the method of immunoassay is a radioimmunoassay or an enzyme-linked immunosorbent assay.

[0457] For detection of each of the biomarkers to determine the ratios, the methods described herein can include a competition immunoassay in which an immunological binding partner described herein and a competition agent are incubated in the presence of the sample and the competition agent competes with the peptide fragments in the sample to bind to the immunological binding partner. Competition agents include, but are not limited to: (1) a synthetic peptide derived from collagen type III, or a competition agent derived from (2) a purified native collagen type III cleaved by proteases to reveal the neo-epitope.

[0458] Competition immunoassays typically employ monoclonal antibodies or antibody binding fragments that specifically bind to neo-epitopes in the biomarkers. Synthetic peptides that contain the sequences of amino acids of the neo-epitopes are coated onto the solid surface of a microtiter for competitions with the sample for binding to the monoclonal antibodies or binding fragments. Alternatively, purified, native collagen type III fragments carrying the neo-epitope recognized by the monoclonal antibody or binding fragment could be used on the solid surface.

[0459] Also included are methods in which the monoclonal antibody or binding fragment is immobilized on a solid surface and the sample is co-incubated with a synthetic peptide appropriately linked to a signal molecule, e.g. horseradish peroxidase or biotin. Assays include sandwich assays using a first immunological binding partner specifically reactive with a neo-epitope and a second immunological binding partner reactive with the relevant protein to which the neo-epitope belongs. Optionally, the second immunological binding partner is directed to a second neo-epitope of the same protein.

[0460] The samples can be, for example, body fluid samples, such as a sample of serum, blood, plasma, amniotic fluid, urine. Samples from circulation are likely to derive from different organs and can reflect systemic remodeling (see, Genovese et al. (2016) Nephrol. Dial. Transplant. 31(3):472-9; Stribos et al. (2017) PLoS One 12(4):e0175898).

[0461] Provided herein are methods that include detecting a neo-epitopic fragment of type III collagen that is produced in the formation of collagen type III but not produced in the degradation of collagen type III. For example, the neo-epitopic fragment is Pro-C3. Pro-C3 can be detected, for example, by binding to an immunological binding partner, such as an antibody, that is specific for Pro-C3. PRO-C3 can be detected, for example, by competitive binding of a monoclonal antibody to soluble Pro-C3 antigens or to Pro-C3 antigens immobilized in microtitre plates. The monoclonal antibody can be specific for the C-terminal end of the N-terminal pro-peptide of Type III collagen generated by the N-protease during formation of Type III collagen. (Pro-C3 package insert ELISA Cat. No. 1700).

[0462] In some examples, the monoclonal antibody is specifically reactive with the neo-epitope C-terminal sequence CPTGPQNYSP (SEQ ID NO:216) in human N-terminal propeptide of type III collagen (PIIINP), which is formed by the N-protease cleavage of PIIINP from intact procollagen type III at the Pro-Gln bond between amino acids P153-Q154 in human PIIINP. N protease cleaves the propeptide at a Pro-Gln bond, corresponding to amino acids 153 and 154 in the human N-terminal propeptide of type III collagen, respectively. This generates a cleavage specific neo-epitope to which a specific antibody can be directed against (Nielsen (2013) Am J Transl Res. 5(3):303-15; U.S. Pat. No. 9,726,674). In some examples, a monoclonal antibody for use in the compositions and methods provided herein is specifically reactive with a C-terminal neo-epitope of type III collagen, such as, for example a type III collagen neo-epitope contained in a C-terminal amino acid sequence CPTGPQNYSP (SEQ ID NO:216), and the monoclonal antibody does not recognize or bind an elongated version of the C-terminal amino acid sequence, such as CPTGPQNYSPQZ (SEQ ID NO:228), wherein Z is absent or is one or more amino acids of the sequence of collagen type III. In some examples, the ratio of the affinity of the monoclonal antibody for a peptide having the neo-epitope sequence CPTGPQNYSP (SEQ ID NO:216) to the affinity of the monoclonal antibody for a peptide having the amino acid sequence CPTGPQNYSPQZ-COOH (SEQ ID NO:228) is at least 10 to 1, at least 100 to 1, at least 1,000 to 1, at least 10,000 to 1, at least 100,000 to 1 or at least 1,000,000 to 1. In some examples, the monoclonal antibody does not recognize or bind to a shortened version of a C-terminal neo-epitope of human PIIINP, such as, for example, a neo-epitope having the sequence CPTGPQNYS (SEQ ID NO:231). In some examples, the ratio of the affinity of the monoclonal antibody for the neo-epitope sequence CPTGPQNYSP (SEQ ID NO:216) to the affinity of the monoclonal antibody for the amino acid sequence CPTGPQNYS (SEQ ID NO:231) is at least 10 to 1, at least 100 to 1, at least 1,000 to 1, at least 10,000 to 1, at least 100,000 to 1 or at least 1,000,000 to 1.

[0463] Monoclonal antibodies that bind to the Pro-C3 neo-epitope are known to those of skill in the art, or can be prepared. The monoclonal antibody NB61N-62, which is described, for example, in U.S. Pat. No. 9,726,674, Nielsen et al. (2013) Am J Transl Res. 5(3):303-15 and Sun et al. (2015) PLoS One 10(12):e0144525, is specific for the C-terminal sequence CPTGPQNYSP (SEQ ID NO:216). Monoclonal antibodies can be prepared by any method known in the art. For example, generation of monoclonal antibodies can be initiated by subcutaneous immunization (e.g., of 4-5 week old Balb/C mice) with Pro-C3 and modified forms thereof, including OVA-CGG-CPTGPQNYSP (SEQ ID NO:220). For example, animals, such as mice can be immunized with 200 μl emulsified antigen and 50 μg Pro-C3 (OVA-CGG-CPTGPQNYSP (SEQ ID NO:220)) using Freund's incomplete adjuvant. (Nielsen et al. (2013) Am J Transl Res. 5(3):303-15).

### C. Therapies with an Anti-Hyaluronan Agent

[0464] Subjects who will benefit from treatment with an anti-hyaluronan agent, selected as described in Section B. 4 above, can be treated with an anti-hyaluronan agent in a variety of treatment regimens. Provided herein are therapies, including combination therapies with an anti-hyaluronan agent, such as a hyaluronan-degrading enzyme, and a tumor targeted-taxane, such as albumin-bound paclitaxel, for use in the treatment of cancers in the subjects selected according to the methods provided herein. For example, provided herein are combination therapies of polymer-conjugated hyaluronan-degrading enzyme, for example a hyaluronidase, such as PEGPH20, and a tumor targeted-taxane, such as albumin-bound paclitaxel, for use in the treatment of cancers in the subjects selected according to the methods provided herein. In particular, the combination therapy provided herein is used in the treatment of any cancers characterized by solid tumors that are impenetrable because of the stromal layer. Exemplary of such cancers include solid tumor cancers, such as but not limited to, pancreatic cancer, breast cancer, prostate cancer, gastric cancer, colon cancer, ovarian cancer, head and neck cancer and others. In a particular example, the cancer is pancreatic cancer, such as metastatic pancreatic ductal adenocarcinoma (PDAC). The combination therapy can further include a further cytotoxic chemotherapeutic drug, for example any whose activity is increased (e.g. due to increased delivery and/or increased half-life) by one or both of the anti-hyaluronan agent, for example, the polymer-conjugated hyaluronan-degrading enzyme, and/or tumor-targeted taxane. For example, the further chemotherapeutic agent can be a nucleoside analog, such as gemcitabine or a derivative thereof, that exhibits direct anti-tumor activities.

[0465] 1. Solid Tumors and Tumor Targeted Therapies

[0466] Solid tumors are made up of cancer cells and stroma cells (e.g. fibroblasts and inflammatory cells) that are surrounded by an extracellular matrix and vascular network. The stromal cells, extracellular matrix components and/or vasculature generally are abnormal compared to those present in normal tissues. For example, many solid tumors have an increased number of fibroblasts compared to normal tissues. Also, the vasculature in solid tumors can exhibit a branched or convoluted structure compared to normal vasculature, and exhibit structural aberrations characterized by dilated vessels, reduction in endothelial lining and/or compressed vessels. Finally, the tumor and stromal cells produce and assemble a complex network of extracellular matrix components, such as collagens, proteoglycans, glycosaminoglycans (e.g. hyaluronan) and other molecules that form a dense mass and can contribute to high tumor interstitial pressure. The high interstitial fluid pressure above the intravascular pressure in the terminal arterioles and capillaries can impair perfusion of fluids and solutes into the interstitium. Thus, the high interstitial pressure can hamper uptake of therapeutics into tumor tissues, and also can affect the growth properties of tumor cells to support tumor cell proliferation.

[0467] For tumor therapies to be effective, the drugs must efficiently exit the tumor blood vessels and penetrate tumor tissues to reach cancer cells. The high interstitial fluid pressure as well as the dense composition and organization of the extracellular matrix and associated cells affect drug penetration. The result is that the stromal barrier often prevents the penetration of antitumor drugs into the tumors, which renders many conventional cancer treatments ineffective.

[0468] For example, pancreatic cancer is among the most impenetrable of all solid tumor cancers. As a result, pancreatic cancers, including pancreatic ductal adenocarcinoma, are characterized by an innate resistance to conventional chemotherapeutics such that the 5-year survival rate is less than 5%. The standard therapy for pancreatic cancer is treatment with gemcitabine. Gemcitabine has limited effects on increasing patient survival. For example, only about a quarter of patients treated with gemcitabine monotherapy exhibit a clinical benefit with median survival of just over 5 months, which was only one month longer than treatment with the chemotherapeutic agent fluorouracil (5-FU) (Burris et al. (1997) J Clin Oncol, 15:2403-2413). In an adjuvant setting where treatment is also accompanied by pancreatic cancer surgery or other non-chemotherapeutic adjuvant therapy, gemcitabine increased survival by two months compared to patients who had surgery alone (Neuhaus et al. (2008) J. Clin. Oncol. 26: May 20 suppl; abst.).

[0469] Therapies have been developed that include a therapeutic agent that can penetrate the stromal layer and associated vasculature. Therapeutics that can deplete the stroma, punch holes in or otherwise penetrate the stroma are viewed as promising therapeutics for many cancers characterized by an impenetrable stromal layer. Such agents include, for example, albumin-conjugated taxanes (Von Hoff et al. (2011) J. Clin. Oncol., 29:4548-54; Frese et al. (2012) Cancer Discovery, 2:260-269), a hedgehog inhibitor (Olive et al. (2009) Science, 324:1457-61) and polymer-conjugated hyaluronidase (Provenzano et al. (2012) Cancer Cell, 21:418-429). Each of these treatments is also associated with increased delivery of non-stromal targeted chemotherapeutic agents, resulting in enhanced antitumor effects and a doubling of survival time compared to chemotherapeutic agent (e.g. gemcitabine) monotherapy.

[0470] a. Anti-Hyaluronan Agent

[0471] Anti-hyaluronan agents reduce hyaluronic acid (HA; also referred to herein as hyaluronan) levels by interfering with its synthesis or increasing its degradation. For example, hyaluronan-degrading enzymes, such as hyaluronidase enzymes, are enzymes that interfere with and degrade hyaluronic acid. Hyaluronan is a major component of the extracellular matrix of solid tumors. HA is a high molecular weight linear glycosaminoglycan that contains repeating disaccharide units, β-1,3 N-acetyl-D-glucosamine-linked β-1,4 to D-glucuronic acid. HA occurs naturally in the body and is secreted at extremely high levels in some cancer cells, including pancreatic cancer cells. Local aberrations of HA metabolism have been reported in many solid tumor malignancies, where elevated levels of HA frequently correlate with poor prognosis in tumors such as breast, gastric, colorectal, ovarian, prostate and lung carcinoma.

[0472] HA is involved in increased water uptake and interstitial fluid pressure (IFP) in diseased tissues, such as tumors, thereby resulting in compressed tumor vasculature. For example, at sites of inflammation or in a tumor focus, there is rapid accumulation of hyaluronan, other matrix components and water. Because of this rapid accumulation, the diseased site cannot come to equilibrium with its environment and therefore has a higher interstitial fluid pressure than normal tissues. As discussed above, the IFP of most solid tumors and other diseased tissues associated with accumulated HA is elevated, acting as a barrier to efficient drug delivery (Heldin et al. (2004) Nat Rev Cancer 4(10):806-813). HA accumulation also reduces contact inhibition between and among tumor cells (see, e.g., Itano et al. (2002) Proc. Natl. Acad. Sci. U.S.A. 99:3609-3614).

[0473] Anti-hyaluronan agents that inhibit HA synthesis or degrade hyaluronan, such as hyaluronan-degrading enzymes, e.g., hyaluronidases (e.g. PH20), can reduce hyaluronan such that the tissue deflates, the blood vessels expand, and more blood can flow through the site. This results in a diminishment of the interstitial fluid pressure at the tissue site and an associated increase in vascular perfusion. For example, hyaluronidase has been shown to remove HA from tumors resulting in the reduction of tumor volume, the reduction of intratumoral interstitial pressure, the slowing of tumor cell proliferation, and the enhanced efficacy of co-administered chemotherapeutic drugs and biological agents by enabling increased tumor penetration (see e.g. U.S. published application No. 2010/0003238 and International published PCT Appl. No WO 2009/128917).

[0474] The use of hyaluronidase, such as a PH20 enzyme, for systemic treatment suffers from problems associated with short half-life of the enzyme. For example, unmodified hyaluronidase typically has a short half-life of enzymatic activity in blood of minutes, generally less than 5 minutes. This means that such enzymes are generally unsuitable for use in intravenous administrations, and other administrations, where their duration of action is short-lived. This is because following degradation, the HA substrate is replaced with a half-life of approximately 5 h. In contrast, methods that increase the delivery and/or prolong the association of a hyaluronidase with cell-associated hyalurounan (e.g. tumor-associated pericellular hyaluronan) allows for treatment of tumors rich in HA. Such methods can include, but are not limited to, conjuation of the enzyme to a polymer, the use of an enzyme that is aglycosylated or that is modified to have reduced glycosyaltion, continuous infusion of the enzyme and/or localized delivery of the enzyme. For example, polymer-modification of hyaluronidase, such as by PEGylation, increases the half-life of the enzyme to approximately 48 to 72 hours and allows for the systemic treatment of tumors rich in HA (see e.g. U.S. published application No. 2010/0003238 and International published PCT Appl. No. WO 2009/128917). The increased half-life relative to unmodified hyaluronidase permits continued removal of HA, and thereby reduces or decreases the extent of regeneration of HA within diseased tissues, such as the tumor. Thus, maintenance of plasma enzyme levels by polymer conjugation can remove HA, such as tumor HA, and also counteract HA resynthesis.

[0475] In addition, polymer-conjugated hyaluronan-degrading enzymes, such as a polymer-conjugated hyaluronidase or PH20, for example PEGPH20, can deplete the stroma surrounding cancer cells by degrading HA. Such agents can be used in single agent therapy for the treatment of tumors or in combination therapy to enhance the delivery of non-stromal targeted chemotherapeutic agents such as gemcitabine. Results from clinical trials of patients with pancreatic cancer also show that PEGPH20 treatment in combination with gemcitabine results in a near doubling of overall survival compared to treatment with gemcitabine alone (Provenzano et al. (2012) Cancer Cell, 21:418-429).

[0476] b. Tumor-Targeted Taxane

[0477] Taxanes, such as paclitaxel (e.g. Taxol®) and docetaxel (e.g. Taxotere®) are potent chemotherapeutic agents for use in the treatment of multiple tumor types. Taxanes act as mitotic inhibitors by binding with high-affinity to microtubules, thereby interfering with cell division. The result is that taxanes prevent tumor cell growth and metastasis, and can cause cell death. Therapeutic use of taxanes has been limited due to problems with solubility and associated toxicities, long-term systemic availability and inaccessibility to the tumor stroma.

[0478] To overcome problems associated with the therapeutic use of taxanes, gp60 receptor targeted nanoparticle drug formulation have been developed made up of albumin-bound particle forms of taxanes. These include, for example, nanoparticle albumin-bound (nab)-paclitaxel (ABI-007, e.g. Abraxane®) and nanoparticle albumin-bound docetaxel (ABI-008). Gp60 is the albumin receptor on vascular endothelium. Albumin receptor-mediated uptake via gp60 results in the association with intracellular caveolin-1 leading to invagination of the cell membrane to form transcytotic vesicles (termed caveolae) containing the bound plasma constituents from the extracellular space, transcytosis and extravascular deposition of the caveolae contents. In addition, albumin also binds to SPARC (secreted protein acid and rich in cysteine), which is an extracellular matrix glycoprotein that is overexpressed and associated with poor prognosis in a variety of cancers. The result is that stromal barriers to drug delivery are circumvented, and a higher intratumoral concentration of the drug is achieved. Nab-Paclitaxel can achieve higher intratumoral concentrations and increased bioavailability compared to conventional solvent-based paclitaxel (Foote (2007) Biotechnology Annual Review, 13:345).

[0479] Since tumor-targeted taxanes, such as albumin-conjugated taxanes, are able to penetrate and deplete or collapse the stroma, these agents can be used in combination with other non-stromal targeted chemotherapeutic agents in order to enhance delivery of the other agents to the tumor. The mechanism for enhanced delivery is attributed to disruption of the stromal architecture and induction of reactive angiogenesis that leads to increased perfusion and delivery of the chemotherapeutic agent (see, e.g., Frese et al. (2012) Cancer Discovery, 2:260-269). For example studies have shown that nab-paclitaxel, an albumin-conjugated taxane, in combination with gemcitabine enhanced by almost 2.8 times the amount of gemcitabine in the tumor compared to treatment with gemcitabine alone (Von Hoff et al. (2011) J. Clin. Oncol., 29:4548-4554). The results also showed that the combination therapy doubled survival time of patients with pancreatic cancer (Von Hoff et al. (2011) J. Clin. Oncol., 29:4548-4554).

[0480] The mechanism for enhanced intratumoral amounts of gemcitabine in combination with nab-paclitaxel therapy has been attributed to an independent mechanism related to a reduction in cytidine deaminase (Cda) in nab-paclitaxel treated groups (Frese et al. (2012) Cancer Discovery 2:260-269). Cda is ubiquitously expressed in cells, and can inactivate gemcitabine by deamination into its metabolite difluorodeoxyuridine (dFdU). The nab-paclitaxel treatment increased reactive oxygen species (ROS), which led to the degradation of Cda without any modulation of mRNA levels. Hence, co-treatment with nab-paclitaxel results in a reduction in the deamination of gemcitabine, and thereby stabilizes gemcitabine leading to an elevation of intratumoral gemcitabine levels.

[0481] 2. Anti-Hyaluronan Agent and Tumor-Targeted Taxane Combination Therapy

[0482] Anti-cancer combination therapies that include administration of a soluble hyaluronidase are known. For example, such treatments are described, for example, in U.S. Pat. No. 9,913,822. These treatments extend overall survival (OS), objective/overall response rate (ORR) and/or progression-free survival (PFS) in intractable cancers. Provided herein are methods, combinations and uses for selecting subjects for such treatments, and also for including as part of the treatment protocol.

[0483] It is shown herein that, for subjects identified as having a “high” C3M/Pro-C3 ratio, an increased benefit was obtained when using combination therapies that include an anti-hyaluronan agent, compared to a treatment regimen without the anti-hyaluronan agent. For such subjects, combination therapy with tumor-targeted taxanes and an anti-hyaluronan agent, in particular an anti-hyaluronan agent capable of reaching pericellular HA on a tumor for a time sufficient to reduce HA levels, exhibits increased efficacy and provides an increased benefit as measured by one or more of PFS, ORR and OS as survival outcomes, compared to the single treatment of either agent alone. For example, combination therapy with a tumor-targeted taxane and a polymer-conjugated hyaluronidase results in an increase in efficacy of greater than 25% compared to the single agent treatment, and provides an increased survival benefit. In further combination with the non-stromal targeted chemotherapeutic drug gemcitabine, the median survival of an exemplary cancer was increased by 79% in a mouse model of pancreatic cancer compared to treatment with only gemcitabine and was increased by over 30% compared to existing therapies containing only a single stromal targeting agent. This increase in efficacy can be translated to a substantial improvement in the survival of patients with pancreatic cancer and other cancers characterized by an impenetrable stroma compared to existing treatments. The methods provided herein permit the election of subjects likely to benefit from such combination therapies by measuring a ratio representing turnover of Type III collagen.

[0484] Hence, provided herein are methods of treatment that include selecting a subject for combination therapy by measuring a ratio reflecting Type III collagen turnover, such as the ratio of C3M/Pro-C3, and then administering a combination therapy containing an anti-hyaluronan agent, such as a hyaluronan-degrading enzyme or polymer-conjugated hyaluronan-degrading enzyme (e.g. hyaluronidase or PH20), and a tumor-targeted taxane, such as an albumin bound-taxane, for treating solid tumor stromal cancers. For example, the combination therapy can be used for the treatment of pancreatic cancer, breast cancer, prostate cancer, gastric cancer, colon cancer, colorectal cancer, lung cancer, ovarian cancer and others. The compositions containing the anti-hyaluronan agent, such as polymer-conjugated hyaluronan-degrading enzyme (e.g. hyaluronidase or PH20), and a tumor-targeted taxane (e.g. albumin bound-taxane) can be provided separately in the combination or provided in a single composition. If provided and administered separately, the agents can be administered simultaneously or near simultaneously, sequentially or intermittently in any order. For example, an anti-hyaluronan agent, e.g., polymer-conjugated hyaluronan-degrading enzyme (e.g. hyaluronidase or PH20) and a tumor-targeted taxane (e.g. albumin bound taxane) can be administered separately, whereby they are administered near simultaneously or are administered hours or days apart. The injection site can be the same or different. If different, the injection site can be near to the injection site of the first administered agent.

[0485] The combination of the tumor-targeted agents can be used together to treat solid tumor stromal cancers, or can be used in further combination with other chemotherapeutic agents or treatments. In particular examples, the combination of an anti-hyaluronan agent, such as a polymer-conjugated hyaluronan-degrading enzyme (e.g. hyaluronidase or PH20), and a tumor-targeted taxane (e.g. albumin bound-taxane) is used in further combination with a chemotherapeutic agent. The other agent can be a stromal or non-stromal targeting agent. Typically, the other agent is a non-stromal cytotoxic agent that exhibits direct antitumor activity. For example, the further chemotherapeutic agent can be a cytotoxic agent such as platinum (cisplatin or carboplatin), paclitaxel, gemcitabine, docetaxel, vinorelbine, irinotecan, and pemetrexed. Typically, the further chemotherapeutic agent is a nucleoside analog, such as gemcitabine. The further treatment or agent can be administered separately or together with the anit-hyaluronan agent, such as the polymer-conjugated hyaluronan-degrading enzyme (e.g. hyaluronidase), and/or a tumor-targeted taxane (e.g. albumin bound-taxane) combination therapy. The further agent can be administered separately in the combination or provided in a single composition. If provided and administered separately, the further agent can be administered simultaneously or near simultaneously, sequentially or intermittently in any order with the anti-hyaluronan agent and/or an albumin bound-taxane combination therapy. Typically, in order to effect enhanced delivery of the further agent, the further agent is administered after administration of the anti-hyaluronan agent and/or an albumin bound-taxane combination therapy. Due to the enhanced delivery and half-life of the further chemotherapeutic agent, the dosage of the further agent for administration can be reduced and/or the frequency of administration can be reduced compared to existing dosage regimes. The result is that the combination therapy provided herein can result in reduced side effects of the co-administered further therapeutic (e.g. nucleoside analog such as gemcitabine) compared to its administration alone or its administration with either of an anti-hyaluronan agent, e.g., hyaluronan-degrading enzyme, or tumor-targeted taxane alone.

[0486] The following sections describe exemplary anti-hyaluronan agents, including polymer-conjugated hyaluronan-degrading enzymes, tumor-targeted taxanes and other exemplary non-limiting chemotherapeutic agents for use in the combination therapy provided herein. Exemplary dosage regimes and methods for treatment of stromal solid tumor cancers also are described.

### D. Combination Therapy Agents

[0487] Provided herein are combination therapies of anti-hyaluronan agents, such as hyaluronan-degrading enzymes, and a tumor targeted-taxane, such as albumin-bound paclitaxel, for the treatment of cancers in subjects selected for such treatment. In particular, provided herein are combination therapies of a polymer-conjugated hyaluronan-degrading enzyme, for example a hyaluronidase, such as PEGPH20, and a tumor targeted-taxane, such as albumin-bound paclitaxel, for use in the treatment of cancers. In particular, the combination therapy provided herein is used in the treatment of any cancers characterized by solid tumors that are impenetrable because of the HA in the extracellular matrix. Exemplary of such cancers include solid tumor cancers, such as but not limited to, pancreatic cancer, breast cancer, prostate cancer, gastric cancer, colon cancer, ovarian cancer, head and neck cancer and others. The combination therapy can further include a further cytotoxic chemotherapeutic drug, for example any whose activity is increased (e.g. due to increased delivery and/or increased half-life) by one or both of the anti-hyaluronan agent, including the polymer-conjugated hyaluronan-degrading enzyme, and/or tumor-targeted taxane. For example, the further chemotherapeutic agent can be a nucleoside analog, such as gemcitabine or a derivate thereof, that exhibits direct anti-tumor activities.

[0488] 1. Anti-Hyaluronan Agents

[0489] The combination therapy, including combinations and methods and use thereof, provided herein contains an anti-hyaluronan agent, such as a hyaluronan degrading enzyme, e.g., a polymer-conjugated hyaluronan-degrading enzyme. The anti-hyaluronan agent is one that can be administered so that it reaches its target, and in particular reaches a tumor cell containing elevated pericellular HA. For example, the anti-hyaluronan agent, such as a hyaluronan-degrading enzyme, can be administered by continuous infusion or injected locally, can be modified with a polymer, or is one that is aglycosylated or is modified such that it is aglycosylated or has decreased glycosylation. In one example, the provided compositions and combinations contain a hyaluronan-degrading enzyme, in particular a hyaluronidase, such as a soluble hyaluronidase (e.g. a PH20 or truncated PH20), that has been modified by conjugation to one or more polymeric molecule (polymer), typically to increase the half-life of the hyaluronan-degrading enzyme, for example, to promote prolonged/sustained treatment effects in a subject.

[0490] Hyaluronan is a component of the extracellular matrix and a major constituent of the interstitial barrier. By catalyzing the hydrolysis of hyaluronan, hyaluronan degrading enzymes lower the viscosity of hyaluronan, thereby increasing tissue permeability and increasing the absorption rate of fluids administered parenterally. As such, anti-hyaluronan agents, including hyaluronan degrading enzymes, such as hyaluronidases, have been used, for example, as spreading or dispersing agents in conjunction with other agents, drugs and proteins to enhance their dispersion and delivery.

[0491] Anti-hyaluronan agents reduce hyaluronic acid (HA; also referred to herein as hyaluronan) levels by interfering with its synthesis or increasing its degradation. For example, hyaluronan degrading enzymes, such as hyaluronidase, interfere with and degrade hyaluronic acid (HA). Treatment with agents that degrade or inhibit hyaluronan synthesis, such as hyaluronan degrading enzymes, reduce the hyaluronan such that the tissue deflates, the blood vessels expand, and more blood can flow through the site. Exemplary of such anti-hyaluronan agents are agents that inhibit hyaluronan synthesis or degrade hyaluronan.

[0492] a. Agents that Inhibit Hyaluronan Synthesis

[0493] Anti-hyaluronan agents include agents that inhibit hyaluronan synthesis, such as agents that inhibit, reduce or downregulate the expression of an HA synthase, HA synthesis inhibitors and tyrosine kinase inhibitors.

[0494] HA can be synthesized by three enzymes that are the products of three related mammalian genes identified as HA synthases, designated has-1, has-2 and has-3. Different cell types express different HAS enzymes and expression of HAS mRNAs is correlated with HA biosynthesis. It is known that silencing HAS genes in tumor cells inhibits tumor growth and metastasis. An anti-hyaluronan agent includes any agent that inhibits, reduces or downregulates the expression or level of an HA synthase. Such agents are known to one of skill in the art or can be identified.

[0495] For example, downregulation of a HAS can be accomplished by providing oligonucleotides that specifically hybridize or otherwise interact with one or more nucleic acid molecules encoding an HAS. For example, anti-hyaluronan agents that inhibit hyaluronan synthesis include antisense or sense molecules against an has gene. Such antisense or sense inhibition is typically based upon hydrogen bonding-based hybridization of oligonucleotide strands or segments such that at least one strand or segment is cleaved, degraded or otherwise rendered inoperable. In other examples, post-transcriptional gene silencing (PTGS), RNAi, ribozymes and DNAzymes can be employed. It is within the level of one of skill in the art to generate such constructs based on the sequence of HAS1 (set forth in SEQ ID NO:195), HAS2 (set forth in SEQ ID NO:196) or HAS3 (set forth in SEQ ID NO:197 or 198). It is understood in the art that the sequence of an antisense or sense compound need not be 100% complementary to that of its target nucleic acid to be specifically hybridizable. Moreover, an oligonucleotide may hybridize over one or more segments such that intervening or adjacent segments are not involved in the hybridization event (e.g. a loop structure or hairpin structure). Generally, the antisense or sense compounds have at least 70% sequence complementarity to a target region within the target nucleic acid, for example, 75% to 100% complementarity, such as 75%, 80%, 85%, 90%, 95% or 100%. Exemplary sense or antisense molecules are known in the art (see e.g. Chao et al. (2005) J. Biol. Chem., 280:27513-27522; Simpson et al. (2002) J. Biol. Chem., 277:10050-10057; Simpson et al. (2002) Am. J Path., 161:849; Nishida et al. (1999) J. Biol. Chem., 274:21893-21899; Edward et al. (2010) British J Dermatology, 162:1224-1232; Udabage et al. (2005) Cancer Res., 65:6139; and published U.S. Patent Publication No. US2007/0286856).

[0496] Another exemplary anti-hyaluronan agent that is an HA synthesis inhibitor is 4-Methylumbelliferone (4-MU; 7-hydroxy-4-methylcoumarin) or a derivative thereof 4-MU acts by reducing the UDP-GlcUA precursor pool that is required for HA synthesis. For example, in mammalian cells, HA is synthesized by HAS using UDP-glucuronic acid (UGA) and UDP-N-acetyl-D-glucosamine precursors. 4-MU interferes with the process by which UGA is generated, thereby depleting the intracellular pool of UGA and resulting in inhibition of HA synthesis. 4-MU is known to have antitumor activity (see e.g. Lokeshwar et al. (2010) Cancer Res., 70:2613-23; Nakazawa et al. (2006) Cancer Chemother. Pharmacol., 57:165-170; Morohashi et al. (2006) Biochem. Biophys. Res. Comm., 345:1454-1459). Oral administration of 4-MU at 600 mg/kg/d reduces metastases by 64% in the B16 melanoma model (Yoshihara et al. (2005) FEBS Lett., 579:2722-6). The structure of 4-MU is set forth below. Also, derivatives of 4-MU exhibit anti-cancer activity, in particular 6,7-dihydrozy-4-methyl coumarin and 5,7-dihydroxy-4-methyl coumarin (see e.g. Morohashi et al. (2006) Biochem. Biophys. Res. Comm., 345:1454-1459).

### 4-Methylumbelliferone (4-MU; C₁₀H₈O₃)

[chemical structure]

[0498] Further exemplary anti-hyaluronan agents are tyrosine kinase inhibitors, such as Leflunomide (Arava), genistein or erbstatin. Leflunomide also is a pyrimidine synthesis inhibitor. Leflunomide is a known drug for the treatment of Rheumatoid arthritis (RA), and also is effective in treating the rejection of allografts as well as xenografts. HA is known to directly or indirectly contribute to RA (see e.g. Stuhlmeier (2005) J Immunol., 174:7376-7382). Tyrosine kinase inhibitors inhibit HAS1 gene expression (Stuhlmeier 2005).

[0499] b. Hyaluronan-Degrading Enzymes and Polymer-Conjugated Hyaluronan-Degrading Enzymes

[0500] Anti-hyaluronan agents include hyaluronan degrading enzymes. Hyaluronan degrading enzymes, such as hyaluronidases, are a family of enzymes that degrade hyaluronan, which is an essential component of the extracellular matrix and a major constituent of the interstitial barrier. Hyaluronan degrading enzymes act to degrade hyaluronan by cleaving hyaluronan polymers, which are composed of repeating disaccharides units, D-glucuronic acid (GlcA) and N-acetyl-D-glucosamine (GlcNAc), linked together via alternating β-1→4 and β-1→3 glycosidic bonds. Hyaluronan chains can reach about 25,000 disaccharide repeats or more in length and polymers of hyaluronan can range in size from about 5,000 to 20,000,000 Da in vivo. By catalyzing the hydrolysis of hyaluronan, a major constituent of the interstitial barrier, hyaluronan degrading enzymes lower the viscosity of hyaluronan, thereby increasing tissue permeability.

[0501] Accordingly, hyaluronan degrading enzymes for the combinations, uses and methods provided include any enzyme having the ability to catalyze the cleavage of a hyaluronan disaccharide chain or polymer. In some examples the hyaluronan degrading enzyme cleaves the β-1→4 glycosidic bond in the hyaluronan chain or polymer. In other examples, the hyaluronan degrading enzyme catalyzes the cleavage of the β-1→3 glycosidic bond in the hyaluronan chain or polymer.

[0502] Hyaluronan-degrading enzymes include hyaluronidases, as well as other enzymes such as chondrotinases and lyases that have the ability to cleave hyaluronan. Further, hyaluronan-degrading enzymes also include soluble forms thereof that can be expressed and secreted from cells. As described below, hyaluronan-degrading enzymes exist in membrane-bound or soluble forms that are secreted from cells. For purposes herein, soluble hyaluronan-degrading enzymes are provided for use in the combinations, methods and uses herein. Thus, where hyaluronan-degrading enzymes include a glycosylphosphatidylinositol (GPI) anchor and/or are otherwise membrane-anchored or insoluble, such hyaluronan-degrading enzymes can be provided in soluble form by truncation or deletion of the GPI anchor to render the enzyme secreted and soluble. Thus, hyaluronan-degrading enzymes include truncated variants, e.g. truncated to remove all or a portion of a GPI anchor. Exemplary of such soluble hyaluronidases are soluble PH20 hyaluronides, such as any set forth in (U.S. Pat. No. 7,767,429; U.S. Publication Nos. US2004/0268425 or US2010/0143457).

[0503] Hyaluronan-degrading enzymes provided herein also include variants of any hyaluronan-degrading enzyme, such as any hyaluronidase or soluble hyaluronidase, for example a PH20, that is known to one of skill in the art or described herein. For example, hyaluronan degrading enzymes can contain one or more variations in its primary sequence, such as amino acid substitutions, additions and/or deletions. A variant of a hyaluronan-degrading enzyme generally exhibits at least or about 60%, 70%, 80%, 90%, 91%, 92%, 93%, 94%, 95%, 96%, 97%, 98%, 99% or more sequence identity compared to the hyaluronan-degrading enzyme not containing the variation. Any variation can be included in the hyaluronan degrading enzyme for the purposes herein provided the enzyme retains hyaluronidase activity, such as at least or about 5%, 10%, 15%, 20%, 25%, 30%, 35%, 40%, 45%, 50%, 55%, 60%, 65%, 70%, 75%, 80%, 85%, 90%, 95% or more of the activity of a hyaluronan degrading enzyme not containing the variation (as measured by in vitro and/or in vivo assays well known in the art and described herein). For example, exemplary of hyaluronan-degrading enzymes, including those that can be conjugated to a polymer, are any set forth in any of SEQ ID NOs: 2, 4-9, 47, 48, 150-170, 183-189 and 199-210, or any that exhibit at least or about 60%, 70%, 80%, 90%, 91%, 92%, 93%, 94%, 95%, 96%, 97%, 98%, 99% or more sequence identity to any of SEQ ID NOs: 2, 4-9, 47, 48, 150-170, 183-189 and 199-210.

[0504] Various forms of hyaluronan degrading enzymes, including hyaluronidases have been prepared and approved for therapeutic use in subjects, including humans. For example, animal-derived hyaluronidase preparations include Vitrase® (ISTA Pharmaceuticals), a purified ovine testicular hyaluronidase, Amphadase® (Amphastar Pharmaceuticals), a bovine testicular hyaluronidase and Hydase™ (Prima Pharm Inc.), a bovine testicular hyaluronidase. Hylenex® (Halozyme Therapeutics) is a human recombinant hyaluronidase produced by genetically engineered Chinese Hamster Ovary (CHO) cells containing nucleic acid encoding soluble forms of PH20, designated rHuPH20 (see e.g., U.S. Publication Nos. US2004/0268425; U.S. Pat. No. 7,767,429). It is understood that any hyaluronidase preparation can be used in the combinations, methods and uses provided herein, see, e.g., U.S. Pat. Nos. 2,488,564, 2,488,565, 2,676,139, 2,795,529, 2,806,815, 2,808,362, 5,747,027 and 5,827,721 and International PCT Publication No. WO2005/118799; U.S. Publication No. US2004/0268425; U.S. Pat. No. 7,767,429; or any provided herein.

[0505] A non-limiting description of exemplary hyaluronan-degrading enzymes, such as hyaluronidase enzymes or soluble hyaluronidase enzyme, for example PH20, for use in the combinations and methods provided herein are described below. Generally, such hyaluronan-degrading enzymes include those that are conjugated to a polymer.

[0506] i. Hyaluronidases

[0507] Hyaluronidases are members of a large family of hyaluronan degrading enzymes. There are three general classes of hyaluronidases: mammalian-type hyaluronidases, bacterial hyaluronidases and hyaluronidases from leeches, other parasites and crustaceans. Other hyaluronidases are known such as yellow jacket wasp (SEQ ID NOs:12 and 13), honey bee (SEQ ID NO:14), white-face hornet (SEQ ID NO:15) and paper wasp (SEQ ID NO:16). Any of such enzymes can be used in the compositions, combinations and methods provided herein.

[0508] (a) Mammalian-type hyaluronidases

[0509] Mammalian-type hyaluronidases (EC 3.2.1.35) are endo-β-N-acetylhexosaminidases that hydrolyze the β-1→4 glycosidic bond of hyaluronan into various oligosaccharide lengths such as tetrasaccharides and hexasaccharides. These enzymes have both hydrolytic and transglycosidase activities, and can degrade hyaluronan and chondroitin sulfates (CS), generally C4-S and C6-S. Hyaluronidases of this type include, but are not limited to, hyaluronidases from cows (bovine) (SEQ ID NOs:10, 11, 64, 203 and 204 and nucleic acid molecules set forth in SEQ ID NOs:190-192), sheep (Ovis aries) (SEQ ID NOs: 26, 27, 63 and 65, nucleic acid molecules set forth in SEQ ID NOs:66 and 193-194), pig (SEQ ID NOs:20-21), mouse (SEQ ID NOs:17-19, 32, 205), rat (SEQ ID NOs:22-24, 31, 206), rabbit (SEQ ID NO:25, 207), orangutan (SEQ ID NO:28), cynomolgus monkey (SEQ ID NOs:29, 202), guinea pig (SEQ ID NO:30, 208), chimpanzee (SEQ ID NOs:101, 199, 200), rhesus monkey (SEQ ID NOs:102, 201), fox (SEQ ID NOs:209 and 210) and human hyaluronidases (SEQ ID NOs:1-2, 36-39). The above hyaluronidases include PH20 hyaluronidases. Also, BH55 hyaluronidase is of this type as described in U.S. Pat. Nos. 5,747,027 and 5,827,721. Exemplary of hyaluronidases in the compositions, combinations and methods provided herein are soluble hyaluronidases.

[0510] Mammalian hyaluronidases can be further subdivided into those that are neutral active, predominantly found in testes extracts, and acid active, predominantly found in organs such as the liver. Exemplary neutral active hyaluronidases include PH20, including but not limited to, PH20 derived from different species such as ovine (SEQ ID NOs:27, 63 and 65), bovine (SEQ ID NO:11 and 64) and human (SEQ ID NO:1). Human PH20 (also known as SPAM1 or sperm surface protein PH20), is generally attached to the plasma membrane via a glycosylphosphatidyl inositol (GPI) anchor. It is naturally involved in sperm-egg adhesion and aids penetration by sperm of the layer of cumulus cells by digesting hyaluronic acid.

[0511] Besides human PH20 (also termed SPAM1), five hyaluronidase-like genes have been identified in the human genome, HYAL1, HYAL2, HYAL3, HYAL4 and HYALP1. HYALP1 is a pseudogene, and HYAL3 (SEQ ID NO:38) has not been shown to possess enzyme activity toward any known substrates. HYAL4 (precursor polypeptide set forth in SEQ ID NO:39) is a chondroitinase and exhibits little activity towards hyaluronan. HYAL1 (precursor polypeptide set forth in SEQ ID NO:36) is the prototypical acid-active enzyme and PH20 (precursor polypeptide set forth in SEQ ID NO:1) is the prototypical neutral-active enzyme. Acid-active hyaluronidases, such as HYAL1 and HYAL2 (precursor polypeptide set forth in SEQ ID NO:37) generally lack catalytic activity at neutral pH (i.e. pH 7). For example, HYAL1 has little catalytic activity in vitro over pH 4.5 (Frost et al. (1997) Anal. Biochem. 251:263-269). HYAL2 is an acid-active enzyme with a very low specific activity in vitro. The hyaluronidase-like enzymes also can be characterized by those which are generally attached to the plasma membrane via a glycosylphosphatidyl inositol (GPI) anchor such as human HYAL2 and human PH20 (Danilkovitch-Miagkova et al. (2003) Proc Natl Acad Sci USA 100(8):4580-4585), and those which are generally soluble such as human HYAL1 (Frost et al. (1997) Biochem Biophys Res Commun. 236(1):10-15).

[0512] PH20

[0513] PH20, like other mammalian hyaluronidases, is an endo-β-N-acetyl-hexosaminidase that hydrolyzes the β1→4 glycosidic bond of hyaluronic acid into various oligosaccharide lengths such as tetrasaccharides and hexasaccharides. It has both hydrolytic and transglycosidase activities and can degrade hyaluronic acid and chondroitin sulfates, such as C4-S and C6-S. PH20 is naturally involved in sperm-egg adhesion and aids penetration by sperm of the layer of cumulus cells by digesting hyaluronic acid. PH20 is located on the sperm surface, and in the lysosome-derived acrosome, where it is bound to the inner acrosomal membrane. Plasma membrane PH20 has hyaluronidase activity only at neutral pH, while inner acrosomal membrane PH20 has activity at both neutral and acid pH. In addition to being a hyaluronidase, PH20 also appears to be a receptor for HA-induced cell signaling, and a receptor for the zona pellucida surrounding the oocyte.

[0514] Exemplary PH20 proteins, including precursor and mature forms, include, but are not limited to, human (precursor polypeptide set forth in SEQ ID NO:1, mature polypeptide set forth in SEQ ID NO:2), chimpanzee (SEQ ID NOs:101, 199, 200), Rhesus monkey (SEQ ID NOs:102, 201), bovine (SEQ ID NOs:11 and 64, 203, 204), rabbit (SEQ ID NOs:25, 207), ovine PH20 (SEQ ID NOs:27, 63 and 65), Cynomolgus monkey (SEQ ID NOs: 29, 202), guinea pig (SEQ ID NOs: 30, 208), rat (SEQ ID NOs: 31, 206), mouse (SEQ ID NOs: 32, 205) and fox (SEQ ID NOs: 209 and 210) PH20 polypeptides.

[0515] Bovine PH20 is a 553 amino acid precursor polypeptide (SEQ ID NO:11). Alignment of bovine PH20 with the human PH20 shows only weak homology, with multiple gaps existing from amino acid 470 through to the respective carboxy termini due to the absence of a GPI anchor in the bovine polypeptide (see e.g., Frost (2007) Expert Opin. Drug. Deliv. 4:427-440). In fact, clear GPI anchors are not predicted in many other PH20 species besides humans. Thus, PH20 polypeptides produced from ovine and bovine naturally exist as soluble forms. Though bovine PH20 exists very loosely attached to the plasma membrane, it is not anchored via a phospholipase sensitive anchor (Lalancette et al. (2001) Biol Reprod. 65(2):628-636). This unique feature of bovine hyaluronidase has permitted the use of the soluble bovine testes hyaluronidase enzyme as an extract for clinical use (Wydase®, Hyalase®).

[0516] The human PH20 mRNA transcript is normally translated to generate a 509 amino acid precursor polypeptide (SEQ ID NO:1) containing a 35 amino acid signal sequence at the N-terminus (amino acid residue positions 1-35) and a 19 amino acid glycosylphosphatidylinositol (GPI) anchor attachment signal sequence at the C-terminus (amino acid residue positions 491-509). The mature PH20 therefore, is a 474 amino acid polypeptide set forth in SEQ ID NO:2. Following transport of the precursor polypeptide to the ER and removal of the signal peptide, the C-terminal GPI-attachment signal peptide is cleaved to facilitate covalent attachment of a GPI anchor to the newly-formed C-terminal amino acid at the amino acid position corresponding to position 490 of the precursor polypeptide set forth in SEQ ID NO:1. Thus, a 474 amino acid GPI-anchored mature polypeptide with an amino acid sequence set forth in SEQ ID NO:2 is produced.

[0517] Human PH20 exhibits hyaluronidase activity at neutral and acid pH. In one aspect, human PH20 is the prototypical neutral-active hyaluronidase that is generally locked to the plasma membrane via a GPI anchor. In another aspect, PH20 is expressed on the inner acrosomal membrane where it has hyaluronidase activity at neutral and acid pH. It appears that PH20 contains two catalytic sites at distinct regions of the polypeptide: the Peptide 1 and Peptide 3 regions (Cherr et al., (2001) Matrix Biology 20:515-525). Evidence indicates that the Peptide 1 region of PH20, which corresponds to amino acid positions 107-137 of the mature polypeptide set forth in SEQ ID NO:2 and positions 142-172 of the precursor polypeptide set forth in SEQ ID NO:1, is required for enzyme activity at neutral pH. Amino acids at positions 111 and 113 (corresponding to the mature PH20 polypeptide set forth in SEQ ID NO:2) within this region appear to be important for activity, as mutagenesis by amino acid replacement results in PH20 polypeptides with 3% hyaluronidase activity or undetectable hyaluronidase activity, respectively, compared to the wild-type PH20 (Arming et al., (1997) Eur. J. Biochem. 247:810-814).

[0518] The Peptide 3 region, which corresponds to amino acid positions 242-262 of the mature polypeptide set forth in SEQ ID NO:2, and positions 277-297 of the precursor polypeptide set forth in SEQ ID NO:1, appears to be important for enzyme activity at acidic pH. Within this region, amino acids at positions 249 and 252 of the mature PH20 polypeptide appear to be essential for activity, and mutagenesis of either one results in a polypeptide essentially devoid of activity (Arming et al., (1997) Eur. J. Biochem. 247:810-814).

[0519] In addition to the catalytic sites, PH20 also contains a hyaluronan-binding site. Experimental evidence indicate that this site is located in the Peptide 2 region, which corresponds to amino acid positions 205-235 of the precursor polypeptide set forth in SEQ ID NO:1 and positions 170-200 of the mature polypeptide set forth in SEQ ID NO:2. This region is highly conserved among hyaluronidases and is similar to the heparin binding motif. Mutation of the arginine residue at position 176 (corresponding to the mature PH20 polypeptide set forth in SEQ ID NO:2) to a glycine results in a polypeptide with only about 1% of the hyaluronidase activity of the wild type polypeptide (Arming et al., (1997) Eur. J. Biochem. 247:810-814).

[0520] There are seven potential glycosylation sites, including N- and O-linked glycosylation sites, in human PH20 at N82, N166, N235, N254, N368, N393 and 5490 of the polypeptide exemplified in SEQ ID NO:1. Because amino acids 36 to 464 of SEQ ID NO:1 appear to contain the minimally active human PH20 hyaluronidase domain, the glycosylation site at 5490 is not required for proper hyaluronidase activity. There are six disulfide bonds in human PH20. Two disulfide bonds between the cysteine residues C60 and C351 and between C224 and C238 of the polypeptide exemplified in SEQ ID NO:1 (corresponding to residues C25 and C316, and C189 and C203 of the mature polypeptide set forth in SEQ ID NO:2, respectively). A further four disulfide bonds are formed between the cysteine residues C376 and C387; between C381 and C435; between C437 and C443; and between C458 and C464 of the polypeptide exemplified in SEQ ID NO:1 (corresponding to residues C341 and C352; between C346 and C400; between C402 and C408; and between C423 and C429 of the mature polypeptide set forth in SEQ ID NO:2, respectively).

[0521] (b) Bacterial Hyaluronidases

[0522] Bacterial hyaluronidases (EC 4.2.2.1 or EC 4.2.99.1) degrade hyaluronan and, to various extents, chondroitin sulfates and dermatan sulfates. Hyaluronan lyases isolated from bacteria differ from hyaluronidases (from other sources, e.g., hyaluronoglucosaminidases, EC 3.2.1.35) by their mode of action. They are endo-β-N-acetylhexosaminidases that catalyze an elimination reaction, rather than hydrolysis, of the β1→4-glycosidic linkage between N-acetyl-beta-D-glucosamine and D-glucuronic acid residues in hyaluronan, yielding 3-(4-deoxy-β-D-gluc-4-enuronosyl)-N-acetyl-D-glucosamine tetra- and hexasaccharides, and disaccharide end products. The reaction results in the formation of oligosaccharides with unsaturated hexuronic acid residues at their nonreducing ends.

[0523] Exemplary hyaluronidases from bacteria for use in the compositions, combinations and methods provided include, but are not limited to, hyaluronan degrading enzymes in microorganisms, including strains of Arthrobacter, Bdellovibrio, Clostridium, Micrococcus, Streptococcus, Peptococcus, Propionibacterium, Bacteroides, and Streptomyces. Particular examples of such strains and enzymes include, but are not limited to Arthrobacter sp. (strain FB24) (SEQ ID NO:67), Bdellovibrio bacteriovorus (SEQ ID NO:68), Propionibacterium acnes (SEQ ID NO:69), Streptococcus agalactiae ((SEQ ID NO:70); 18RS21 (SEQ ID NO:71); serotype Ia (SEQ ID NO:72); and serotype III (SEQ ID NO:73)), Staphylococcus aureus (strain COL (SEQ ID NO:74); strain MRSA252 (SEQ ID NOs:75 and 76); strain MSSA476 (SEQ ID NO:77); strain NCTC 8325 (SEQ ID NO:78); strain bovine RF122 (SEQ ID NOs:79 and 80); and strain USA300 (SEQ ID NO:81)), Streptococcus pneumoniae ((SEQ ID NO:82); strain ATCC BAA-255/R6 (SEQ ID NO:83); and serotype 2, strain D39/NCTC 7466 (SEQ ID NO:84)), Streptococcus pyogenes (serotype M1 (SEQ ID NO:85); serotype M2, strain MGAS10270 (SEQ ID NO:86); serotype M4, strain MGAS10750 (SEQ ID NO:87); serotype M6 (SEQ ID NO:88); serotype M12, strain MGAS2096 (SEQ ID NOs:89 and 90); serotype M12, strain MGAS9429 (SEQ ID NO:91); and serotype M28 (SEQ ID NO:92)); Streptococcus suis (SEQ ID NOs:93-95); Vibrio fischeri (strain ATCC 700601/ES114 (SEQ ID NO:96)), and the Streptomyces hyaluronolyticus hyaluronidase enzyme, which is specific for hyaluronic acid and does not cleave chondroitin or chondroitin sulfate (Ohya, T. and Kaneko, Y. (1970) Biochim. Biophys. Acta 198:607).

[0524] (c) Hyaluronidases from Leeches, Other Parasites and Crustaceans

[0525] Hyaluronidases from leeches, other parasites, and crustaceans (EC 3.2.1.36) are endo-β-glucuronidases that generate tetra- and hexasaccharide end-products. These enzymes catalyze hydrolysis of 1→3-linkages between β-D-glucuronate and N-acetyl-D-glucosamine residues in hyaluronate. Exemplary hyaluronidases from leeches include, but are not limited to, hyaluronidase from Hirudinidae (e.g., Hirudo medicinalis), Erpobdellidae (e.g., Nephelopsis obscura and Erpobdella punctata,), Glossiphoniidae (e.g., Desserobdella picta, Helobdella stagnalis, Glossiphonia complanata, Placobdella ornata and Theromyzon sp.) and Haemopidae (Haemopis marmorata) (Hovingh et al. (1999) Comp Biochem Physiol B Biochem Mol Biol. 124(3):319-26). An exemplary hyaluronidase from bacteria that has the same mechanism of action as the leech hyaluronidase is that from the cyanobacteria, Synechococcus sp. (strain RCC307, SEQ ID NO:97).

[0526] ii. Other Hyaluronan Degrading Enzymes

[0527] In addition to the hyaluronidase family, other hyaluronan degrading enzymes can be used in the compositions, combinations and methods provided. For example, enzymes, including particular chondroitinases and lyases, that have the ability to cleave hyaluronan can be employed. Exemplary chondroitinases that can degrade hyaluronan include, but are not limited to, chondroitin ABC lyase (also known as chondroitinase ABC), chondroitin AC lyase (also known as chondroitin sulfate lyase or chondroitin sulfate eliminase) and chondroitin C lyase. Methods for production and purification of such enzymes for use in the compositions, combinations, and methods provided are known in the art (e.g., U.S. Pat. No. 6,054,569; Yamagata, et al. (1968) J. Biol. Chem. 243(7):1523-1535; Yang et al. (1985) J. Biol. Chem. 160(30): 1849-1857).

[0528] Chondroitin ABC lyase contains two enzymes, chondroitin-sulfate-ABC endolyase (EC 4.2.2.20) and chondroitin-sulfate-ABC exolyase (EC 4.2.2.21) (Hamai et al. (1997) J. Biol. Chem. 272(14):9123-30), which degrade a variety of glycosaminoglycans of the chondroitin-sulfate- and dermatan-sulfate type. Chondroitin sulfate, chondroitin-sulfate proteoglycan and dermatan sulfate are the preferred substrates for chondroitin-sulfate-ABC endolyase, but the enzyme also can act on hyaluronan at a lower rate. Chondroitin-sulfate-ABC endolyase degrades a variety of glycosaminoglycans of the chondroitin-sulfate- and dermatan-sulfate type, producing a mixture of 44-unsaturated oligosaccharides of different sizes that are ultimately degraded to 44-unsaturated tetra- and disaccharides. Chondroitin-sulfate-ABC exolyase has the same substrate specificity but removes disaccharide residues from the non-reducing ends of both polymeric chondroitin sulfates and their oligosaccharide fragments produced by chondroitin-sulfate-ABC endolyase (Hamai, A. et al. (1997) J Biol. Chem. 272:9123-9130). Exemplary chondroitin-sulfate-ABC endolyases and chondroitin-sulfate-ABC exolyases include, but are not limited to, those from Proteus vulgaris and Flavobacterium heparinum (the Proteus vulgaris chondroitin-sulfate-ABC endolyase is set forth in SEQ ID NO:98 (Sato et al. (1994) Appl. Microbiol. Biotechnol. 41(1):39-46)).

[0529] Chondroitin AC lyase (EC 4.2.2.5) is active on chondroitin sulfates A and C, chondroitin and hyaluronic acid, but is not active on dermatan sulfate (chondroitin sulfate B). Exemplary chondroitinase AC enzymes from the bacteria include, but are not limited to, those from Flavobacterium heparinum and Victivallis vadensis, set forth in SEQ ID NOs:99 and 100, respectively, and Arthrobacter aurescens (Tkalec et al. (2000) Applied and Environmental Microbiology 66(1):29-35; Ernst et al. (1995) Critical Reviews in Biochemistry and Molecular Biology 30(5):387-444).

[0530] Chondroitinase C cleaves chondroitin sulfate C producing a tetrasaccharide plus an unsaturated 6-sulfated disaccharide (delta Di-6S). It also cleaves hyaluronic acid producing unsaturated non-sulfated disaccharide (delta Di-OS). Exemplary chondroitinase C enzymes from the bacteria include, but are not limited to, those from Streptococcus and Flavobacterium (Hibi et al. (1989) FEMS-Microbiol-Lett. 48(2):121-4; Michelacci et al. (1976) J. Biol. Chem. 251:1154-8; Tsuda et al. (1999) Eur. J. Biochem. 262:127-133).

[0531] iii. Soluble Hyaluronan Degrading Enzymes

[0532] Provided in the compositions, combinations, uses and methods herein are soluble hyaluronan degrading enzymes, including soluble hyaluronidases. Soluble hyaluronan degrading enzymes include any hyaluronan degrading enzymes that are secreted from cells (e.g. CHO cell) upon expression and exist in soluble form. Such enzymes include, but are not limited to, soluble hyaluronidases, including non-human soluble hyaluronidases, including non-human animal soluble hyaluronidases, bacterial soluble hyaluronidases and human hyaluronidases, Hyal1, bovine PH20 and ovine PH20, allelic variants thereof and other variants thereof. For example, included among soluble hyaluronan degrading enzymes are any hyaluronan degrading enzymes that have been modified to be soluble. For example, hyaluronan degrading enzymes that contain a GPI anchor can be made soluble by truncation of and removal of all or a portion of the GPI anchor. In one example, the human hyaluronidase PH20, which is normally membrane anchored via a GPI anchor, can be made soluble by truncation of and removal of all or a portion of the GPI anchor at the C-terminus.

[0533] Soluble hyaluronan degrading enzymes also include neutral active and acid active hyaluronidases. Depending on factors, such as, but not limited to, the desired level of activity of the enzyme following administration and/or site of administration, neutral active and acid active hyaluronidases can be selected. In a particular example, the hyaluronan degrading enzyme for use in the compositions, combinations and methods herein is a soluble neutral active hyaluronidase.

[0534] Exemplary of hyaluronidases include a soluble form of a PH20 from any species, such as a soluble form of a PH20 of any of SEQ ID NOs: 1, 2, 11, 25, 27, 29-32, 63-65, 101-102 and 199-210. Such soluble forms include truncated forms thereof lacking all or a portion of the C-terminal GPI anchor, so long as the hyaluronidase is soluble (secreted upon expression) and retains hyaluronidase activity. Such forms also typically are mature forms that, when expressed in a cell, lack the signal peptide. Also included among soluble hyaluronidases are soluble forms of variants of any of the PH20s from any species set forth in SEQ ID NOs:1, 2, 11, 25, 27, 29-32, 63-65, 101-102 and 199-210, or truncated forms thereof, that exhibit hyaluronidase activity. Variants include polypeptides having 60%, 70%, 80%, 90%, 91%, 92%, 93%, 94%, 95%, 96%, 97%, 98%, 99% or more sequence identity to any of SEQ ID NOs: 1, 2, 11, 25, 27, 29-32, 63-65, 101-102 and 199-210, mature (e.g. lacking the signal sequence) or truncated forms thereof. Amino acid variants include conservative and non-conservative mutations. It is understood that residues that are important or otherwise required for the activity of a hyaluronidase, such as any described above or known to skill in the art, are generally invariant and cannot be changed. These include, for example, active site residues. Thus, for example, amino acid residues 111, 113 and 176 (corresponding to residues in the mature PH20 polypeptide set forth in SEQ ID NO:2) of a human PH20 polypeptide, or soluble form thereof, are generally invariant and are not altered. Other residues that confer glycosylation and formation of disulfide bonds required for proper folding also can be invariant.

[0535] In some instances, the soluble hyaluronan degrading enzyme is normally GPI-anchored (such as, for example, human PH20) and is rendered soluble by truncation at the C-terminus. Such truncation can remove all of the GPI anchor attachment signal sequence, or can remove only some of the GPI anchor attachment signal sequence. The resulting polypeptide, however, is soluble. In instances where the soluble hyaluronan degrading enzyme retains a portion of the GPI anchor attachment signal sequence, 1, 2, 3, 4, 5, 6, 7 or more amino acid residues in the GPI-anchor attachment signal sequence can be retained, provided the polypeptide is soluble. Polypeptides containing one or more amino acids of the GPI anchor are termed extended soluble hyaluronan degrading enzymes. One of skill in the art can determine whether a polypeptide is GPI-anchored using methods well known in the art. Such methods include, but are not limited to, using known algorithms to predict the presence and location of the GPI-anchor attachment signal sequence and ω-site, and performing solubility analyses before and after digestion with phosphatidylinositol-specific phospholipase C (PI-PLC) or D (PI-PLD).

[0536] Extended soluble hyaluronan degrading enzymes can be produced by making C-terminal truncations to any naturally GPI-anchored hyaluronan degrading enzyme such that the resulting polypeptide is soluble and contains one or more amino acid residues from the GPI-anchor attachment signal sequence (see, e.g., U.S. Published Pat. Appl. No. US2010/0143457). Exemplary extended soluble hyaluronan degrading enzymes that are C-terminally truncated but retain a portion of the GPI anchor attachment signal sequence include, but are not limited to, extended soluble PH20 (esPH20) polypeptides of primate origin, such as, for example, human and chimpanzee esPH20 polypeptides. For example, the esPH20 polypeptides can be made by C-terminal truncation of any of the mature or precursor polypeptides set forth in SEQ ID NOs:1, 2, 50, 51 or 101, or other variants thereof, including active fragment thereof, wherein the resulting polypeptide is soluble and retains one or more amino acid residues from the GPI-anchor attachment signal sequence. Variants include polypeptides having 60%, 70%, 80%, 90%, 91%, 92%, 93%, 94%, 95% or more sequence identity to any of SEQ ID NOs: 1, 2, 50, 51 or 101 that retain hyaluronidase activity. The esPH20 polypeptides provided herein can be C-terminally truncated by 1, 2, 3, 4, 5, 6, 7, 8, 9, 10 or more amino acids compared to the wild type polypeptide, such as a polypeptide with a sequence set forth in SEQ ID NOs: 1, 2, 50, 51 or 101, provided the resulting esPH20 polypeptide is soluble and retains 1 or more amino acid residues from the GPI-anchor attachment signal sequence.

[0537] Typically, for use in the compositions, combinations and methods herein, a soluble human hyaluronan degrading enzyme, such as a soluble human PH20, is used. Although hyaluronan degrading enzymes, such as PH20, from other animals can be utilized, such preparations are potentially immunogenic, since they are animal proteins. For example, a significant proportion of patients demonstrate prior sensitization secondary to ingested foods, and since these are animal proteins, all patients have a risk of subsequent sensitization. Thus, non-human preparations may not be suitable for chronic use. If non-human preparations are desired, it is contemplated herein that such polypeptides can be prepared to have reduced immunogenicity. Such modifications are within the level of one of skill in the art and can include, for example, removal and/or replacement of one or more antigenic epitopes on the molecule.

[0538] Hyaluronan degrading enzymes, including hyaluronidases (e.g., PH20), used in the methods herein can be recombinantly produced or can be purified or partially-purified from natural sources, such as, for example, from testes extracts. Methods for production of recombinant proteins, including recombinant hyaluronan degrading enzymes, are provided elsewhere herein and are well known in the art.

[0539] (a) Soluble Human PH20

[0540] Exemplary of a soluble hyaluronidase is soluble human PH20. Soluble forms of recombinant human PH20 have been produced and can be used in the compositions, combinations and methods described herein. The production of such soluble forms of PH20 is described in U.S. Published Patent Application Nos. US2004/0268425; US2005/0260186, US2006/0104968, US2010/0143457 and International PCT Publication No. WO2009/111066. For example, soluble PH20 polypeptides, include C-terminally truncated variant polypeptides that include a sequence of amino acids in SEQ ID NO:1 or 2, or have at least 91%, 92%, 93%, 94%, 95%, 96%, 97%, or 98% sequence identity to a sequence of amino acids included in SEQ ID NO:1 or 2, retain hyaluronidase activity and are soluble. Included among these polypeptides are soluble PH20 polypeptides that completely lack all or a portion of the GPI-anchor attachment signal sequence.

[0541] Also included are extended soluble PH20 (esPH20) polypeptides that contain at least one amino acid of the GPI anchor. Thus, instead of having a GPI-anchor covalently attached to the C-terminus of the protein in the ER and being anchored to the extracellular leaflet of the plasma membrane, these polypeptides are secreted and are soluble. C-terminally truncated PH20 polypeptides can be C-terminally truncated by 1, 2, 3, 4, 5, 6, 7, 8, 9, 10, 11, 12, 13, 14, 15, 16, 17, 18, 19, 20, 25, 30, 35, 40, 45, 50, 55, 60 or more amino acids compared to the full length wild type polypeptide, such as a full length wild type polypeptide with a sequence set forth in SEQ ID NOs:1 or 2, or allelic or species variants or other variants thereof.

[0542] For example, soluble forms include, but are not limited to, C-terminal truncated polypeptides of human PH20 set forth in SEQ ID NO:1 having a C-terminal amino acid residue 467, 468, 469, 470, 471, 472, 473, 474, 475, 476, 477, 478, 479, 480, 481, 482 and 483, 484, 485, 486, 487, 488, 489, 490, 491, 492, 493, 494, 495, 496, 497, 498, 499 or 500 of the sequence of amino acids set forth in SEQ ID NO:1, or polypeptides that exhibit at least 85% identity thereto. Soluble forms of human PH20 generally include those that contain amino acids 36-464 set forth in SEQ ID NO:1. For example, when expressed in mammalian cells, the 35 amino acid N-terminal signal sequence is cleaved during processing, and the mature form of the protein is secreted. Thus, the mature soluble polypeptides contain amino acids 36 to 467, 468, 469, 470, 471, 472, 473, 474, 475, 476, 477, 478, 479, 480, 481, 482 and 483 of SEQ ID NO:1. Table 3 provides non-limiting examples of exemplary C-terminally truncated PH20 polypeptides, including C-terminally truncated soluble PH20 polypeptides. In Table 3 below, the length (in amino acids) of the precursor and mature polypeptides, and the sequence identifier (SEQ ID NO) in which exemplary amino acid sequences of the precursor and mature polypeptides of the C-terminally truncated PH20 proteins are set forth, are provided. The wild-type PH20 polypeptide also is included in Table 3 for comparison. In particular, exemplary of soluble hyaluronidases are soluble human PH20 polypeptides that are 442, 443, 444, 445, 446 or 447 amino acids in length, such as set forth in any of SEQ ID NOs: 4-9, or allelic or species variants or other variants thereof.

TABLE 3
Exemplary C-terminally truncated PH20 polypeptides

| | Precursor | | Mature | |
|---|---|---|---|---|
| | (amino | Precursor | (amino | Mature |
| Polypeptide | acids) | SEQ ID NO | acids) | SEQ ID NO |
| wildtype | 509 | 1 | 474 | 2 |
| SPAM1-SILF | 500 | 139 | 465 | 183 |
| SPAM-VSIL | 499 | 106 | 464 | 150 |
| SPAM1-IVSI | 498 | 140 | 463 | 184 |
| SPAM1-FIVS | 497 | 107 | 462 | 151 |
| SPAM1-MFIV | 496 | 141 | 461 | 185 |
| SPAM1-TMFI | 495 | 108 | 460 | 152 |
| SPAM1-ATMF | 494 | 142 | 459 | 186 |
| SPAM1-SATM | 493 | 109 | 458 | 153 |
| SPAM1-LSAT | 492 | 143 | 457 | 187 |
| SPAM1-TLSA | 491 | 110 | 456 | 154 |
| SPAM1-STLS | 490 | 112 | 455 | 156 |
| SPAM1-PSTL | 489 | 111 | 454 | 155 |
| SPAM1-SPST | 488 | 144 | 453 | 188 |
| SPAM1-ASPS | 487 | 113 | 452 | 157 |
| SPAM1-NASP | 486 | 145 | 451 | 189 |
| SPAM1-YNAS | 485 | 114 | 450 | 158 |
| SPAM1-FYNA | 484 | 115 | 449 | 159 |
| SPAM1-IFYN | 483 | 46 | 448 | 48 |
| SPAM1-QIFY | 482 | 3 | 447 | 4 |
| SPAM1-PQIF | 481 | 45 | 446 | 5 |
| SPAM1-EPQI | 480 | 44 | 445 | 6 |
| SPAM1-EEPQ | 479 | 43 | 444 | 7 |
| SPAM1-TEEP | 478 | 42 | 443 | 8 |
| SPAM1-ETEE | 477 | 41 | 442 | 9 |
| SPAM1-METE | 476 | 116 | 441 | 160 |
| SPAM1-PMET | 475 | 117 | 440 | 161 |
| SPAM1-PPME | 474 | 118 | 439 | 162 |
| SPAM1-KPPM | 473 | 119 | 438 | 163 |
| SPAM1-LKPP | 472 | 120 | 437 | 164 |
| SPAM1-FLKP | 471 | 121 | 436 | 165 |
| SPAM1-AFLK | 470 | 122 | 435 | 166 |
| SPAM1-DAFL | 469 | 123 | 434 | 167 |
| SPAM1-IDAF | 468 | 124 | 433 | 168 |
| SPAM1-CIDA | 467 | 40 | 432 | 47 |
| SPAM1-VCID | 466 | 125 | 431 | 169 |
| SPAM1-GVCI | 465 | 126 | 430 | 170 |

[0543] For example, soluble forms of PH20 include, for example, a polypeptide that has the sequence of amino acids set forth in any of SEQ ID NOs: 4-9, 47, 48, 150-170, and 183-189, or a sequence of amino acids that exhibits at least 85%, 86%, 87%, 88%, 89%, 90%, 91%, 92%, 93%, 94%, 95%, 96%, 97%, 98% or 99% sequence identity to a sequence of amino acids set forth in any of SEQ ID NOs: 4-9, 47, 48, 150-170, 183-189 and retains hyaluronidase activity.

[0544] Generally soluble forms of PH20 are produced using protein expression systems that facilitate correct N-glycosylation to ensure the polypeptide retains activity, since glycosylation is important for the catalytic activity and stability of hyaluronidases. Such cells include, for example Chinese Hamster Ovary (CHO) cells (e.g. DG44 CHO cells).

[0545] (b) rHuPH20

[0546] Recombinant soluble forms of human PH20 have been generated and can be used in the compositions, combinations and methods provided herein. The generation of such soluble forms of recombinant human PH20 are described, for example, in U.S. Published Patent Application Nos. US2004/0268425; US 2005/0260186; US2006/0104968; US2010/0143457; and International PCT Appl. No. WO2009/111066. Exemplary of such polypeptides are those generated by expression of a nucleic acid molecule encoding amino acids 1-482 (set forth in SEQ ID NO:3). Such an exemplary nucleic acid molecule is set forth in SEQ ID NO:49. Post translational processing removes the 35 amino acid signal sequence, leaving a 447 amino acid soluble recombinant human PH20 (SEQ ID NO:4). As produced in the culture medium there is heterogeneity at the C-terminus such that the product, designated rHuPH20, includes a mixture of species that can include any one or more of SEQ ID NOs: 4-9 in various abundance. Typically, rHuPH20 is produced in cells that facilitate correct N-glycosylation to retain activity, such as CHO cells (e.g. DG44 CHO cells).

[0547] iv. Glycosylation of Hyaluronan Degrading Enzymes

[0548] Glycosylation, including N- and O-linked glycosylation, of some hyaluronan degrading enzymes, including hyaluronidases, can be important for their catalytic activity and stability. While altering the type of glycan modifying a glycoprotein can have dramatic affects on a protein's antigenicity, structural folding, solubility, and stability, most enzymes are not thought to require glycosylation for optimal enzyme activity. For some hyaluronidases, removal of N-linked glycosylation can result in near complete inactivation of the hyaluronidase activity. Thus, for such hyaluronidases, the presence of N-linked glycans is critical for generating an active enzyme.

[0549] N-linked oligosaccharides fall into several major types (oligomannose, complex, hybrid, sulfated), all of which have (Man) 3-GlcNAc-GlcNAc- cores attached via the amide nitrogen of Asn residues that fall within -Asn-Xaa-Thr/Ser-sequences (where Xaa is not Pro). Glycosylation at an -Asn-Xaa-Cys-site has been reported for coagulation protein C. In some instances, a hyaluronan degrading enzyme, such as a hyaluronidase, can contain both N-glycosidic and 0-glycosidic linkages. For example, PH20 has O-linked oligosaccharides as well as N-linked oligosaccharides. There are six potential N-linked glycosylation sites at N82, N166, N235, N254, N368, N393 of human PH20 exemplified in SEQ ID NO:1. Amino acid residues N82, N166 and N254 are occupied by complex type glycans whereas amino acid residues N368 and N393 are occupied by high mannose type glycans. Amino acid residue N235 is occupied by approximately 80% high mannose type glycans and 20% complex type glycans. As noted above, O-linked glycosylation at 5490 is not required for hyaluronidase activity.

[0550] In some examples, the hyaluronan degrading enzymes for use in the compositions, combinations and/or methods provided are glycosylated at one or all of the glycosylation sites. For example, for human PH20, or a soluble form thereof, 2, 3, 4, 5, or 6 of the N-glycosylation sites corresponding to amino acids N82, N166, N235, N254, N368, and N393 of SEQ ID NO:1 are glycosylated. In some examples the hyaluronan degrading enzymes are glycosylated at one or more native glycosylation sites. In other examples, the hyaluronan degrading enzymes are modified at one or more non-native glycosylation sites to confer glycosylation of the polypeptide at one or more additional site. In such examples, attachment of additional sugar moieties can enhance the pharmacokinetic properties of the molecule, such as improved half-life and/or improved activity.

[0551] In other examples, the hyaluronan degrading enzymes for use in the compositions, combinations and/or methods provided herein are partially deglycosylated (or N-partially glycosylated polypeptides). For example, partially deglycosylated soluble PH20 polypeptides that retain all or a portion of the hyaluronidase activity of a fully glycosylated hyaluronidase can be used in the compositions, combinations and/or methods provided herein. Exemplary partially deglycosylated hyalurodinases include soluble forms of a partially deglycosylated PH20 polypeptides from any species, such as any set forth in any of SEQ ID NOs: 1, 2, 11, 25, 27, 29-32, 63, 65, 101-102 and 199-210, or allelic variants, truncated variants, or other variants thereof. Such variants are known to one of skill in the art, and include polypeptides having 60%, 70%, 80%, 90%, 91%, 92%, 93%, 94%, 95% or more sequence identity to any of SEQ ID NOs: 1, 2, 11, 25, 27, 29-32, 63, 65, 101-102 and 199-210, or truncated forms thereof. The partially deglycosylated hyaluronidases provided herein also include hybrid, fusion and chimeric partially deglycosylated hyaluronidases, and partially deglycosylated hyaluronidase conjugates.

[0552] Glycosidases, or glycoside hydrolases, are enzymes that catalyze the hydrolysis of the glycosidic linkage to generate two smaller sugars. The major types of N-glycans in vertebrates include high mannose glycans, hybrid glycans and complex glycans. There are several glycosidases that result in only partial protein deglycosylation, including: EndoF1, which cleaves high mannose and hybrid type glycans; EndoF2, which cleaves biantennary complex type glycans; EndoF3, which cleaves biantennary and more branched complex glycans; and EndoH, which cleaves high mannose and hybrid type glycans. Treatment of a hyaluronan degrading enzyme, such as a soluble hyaluronidase, such as a soluble PH20, with one or all of these glycosidases can result in only partial deglycosylation and, therefore, retention of hyaluronidase activity.

[0553] Partially deglycosylated hyaluronan degrading enzymes, such as partially deglycosylated soluble hyaluronidases, can be produced by digestion with one or more glycosidases, generally a glycosidase that does not remove all N-glycans but only partially deglycosylates the protein. For example, treatment of PH20 (e.g. a recombinant PH20 designated rHuPH20) with one or all of the above glycosidases (e.g. EndoF1, EndoF2 and/or EndoF3) results in partial deglycosylation. These partially deglycosylated PH20 polypeptides can exhibit hyaluronidase enzymatic activity that is comparable to the fully glycosylated polypeptides. In contrast, treatment of PH20 with PNGaseF, a glycosidase that cleaves all N-glycans, results in complete removal of all N-glycans and thereby renders PH20 enzymatically inactive. Thus, although all N-linked glycosylation sites (such as, for example, those at amino acids N82, N166, N235, N254, N368, and N393 of human PH20, exemplified in SEQ ID NO:1) can be glycosylated, treatment with one or more glycosidases can render the extent of glycosylation reduced compared to a hyaluronidase that is not digested with one or more glycosidases.

[0554] The partially deglycosylated hyaluronan degrading enzymes, including partially deglycosylated soluble PH20 polypeptides, can have 10%, 20%, 30%, 40%, 50%, 60%, 70% or 80% of the level of glycosylation of a fully glycosylated polypeptide. In one example, 1, 2, 3, 4, 5 or 6 of the N-glycosylation sites corresponding to amino acids N82, N166, N235, N254, N368, and N393 of SEQ ID NO:1 are partially deglycosylated, such that they no longer contain high mannose or complex type glycans, but rather contain at least an N-acetylglucosamine moiety. In some examples, 1, 2 or 3 of the N-glycosylation sites corresponding to amino acids N82, N166 and N254 of SEQ ID NO:1 are deglycosylated, that is, they do not contain a sugar moiety. In other examples, 3, 4, 5, or 6 of the N-glycosylation sites corresponding to amino acids N82, N166, N235, N254, N368, and N393 of SEQ ID NO:1 are glycosylated. Glycosylated amino acid residues minimally contain an N-acetylglucosamine moiety. Typically, the partially deglyclosylated hyaluronan degrading enzymes, including partially deglycosylated soluble PH20 polypeptides, exhibit hyaluronidase activity that is 10%, 20%, 30%, 40%, 50%, 60%, 70%, 80%, 90%, 100%, 110%, 120%, 130%, 140%, 150%, 200%, 300%, 400%, 500%, 1000% or more of the hyaluronidase activity exhibited by the fully glycosylated polypeptide.

[0555] v. Modified (Polymer-Conjugated) Hyaluronan Degrading Enzymes

[0556] Covalent or other stable attachment (conjugation) of polymeric molecules, such as polyethylene glycol (PEGylation moiety (PEG)), to the hyaluronan degrading enzymes, such as hyaluronidases, impart beneficial properties to the resulting hyaluronan degrading enzyme-polymer composition. Such properties include improved biocompatibility, extension of protein (and enzymatic activity) half-life in the blood, cells and/or in other tissues within a subject, effective shielding of the protein from proteases and hydrolysis, improved biodistribution, enhanced pharmacokinetics and/or pharmacodynamics, and increased water solubility.

[0557] Exemplary polymers that can be conjugated to the hyaluronan degrading enzyme, such as the hyaluronidase, include natural and synthetic homopolymers, such as polyols (i.e. poly-OH), polyamines (i.e. poly-NH2) and polycarboxyl acids (i.e. poly-COOH), and further heteropolymers i.e. polymers comprising one or more different coupling groups e.g. a hydroxyl group and amine groups. Examples of suitable polymeric molecules include polymeric molecules selected from among polyalkylene oxides (PAO), such as polyalkylene glycols (PAG), including polyethylene glycols (PEG), methoxypolyethylene glycols (mPEG) and polypropylene glycols, PEG-glycidyl ethers (Epox-PEG), PEG-oxycarbonylimidazole (CDI-PEG) branched polyethylene glycols (PEGs), polyvinyl alcohol (PVA), poly(ethyleneimine) (PEI), linear polyamidoamines, polyacrylamide (PAAm), polydimethylacrylamide (PDAAm), polyvinyl alchol (PVA), polycarboxylates, polyvinylpyrrolidone (PVP), poly-D,L-amino acids, polyethylene-co-maleic acid anhydride, polystyrene-co-maleic acid anhydride, dextrans including carboxymethyl-chitosan, dextrin, dextrans, heparin, homologous albumin, celluloses, including methylcellulose, carboxymethylcellulose, ethylcellulose, hydroxyethyl cellulose carboxyethylcellulose and hydroxypropylcellulose, hydrolysates of chitosan, starches such as hydroxyethyl-starches and hydroxypropyl-starches, glycogen, agaroses and derivatives thereof, guar gum, pullulan, inulin, xanthan gum, carrageenan, pectin, alginic acid hydrolysates and bio-polymers.

[0558] Typically, the polymers are polyalkylene oxides (PAO), such as polyethylene oxides, such as PEG, typically mPEG, which, in comparison to polysaccharides such as dextran and pullulan, have few reactive groups capable of cross-linking. Typically, the polymers are non-toxic polymeric molecules such as (m)polyethylene glycol (mPEG) which can be covalently conjugated to the hyaluronan degrading enzyme, such as the hyaluronidase (e.g. to attachment groups on the protein's surface) using a relatively simple chemistry.

[0559] PEGylation of therapeutics has been reported to increase resistance to proteolysis, increase plasma half-life, and decrease antigenicity and immunogenicity. Examples of PEGylation methodologies are known in the art (see for example, Lu and Felix, Int. J. Peptide Protein Res., 43:127-138, 1994; Lu and Felix, Peptide Res., 6:140-6, 1993; Felix et al., Int. J Peptide Res., 46:253-64, 1995; Benhar et al., J. Biol. Chem., 269: 13398-404, 1994; Brumeanu et al., J. Immunol., 154:3088-95, 1995; see also, Caliceti et al. (2003) Adv. Drug Deliv. Rev. 55(10):1261-77 and Molineux (2003) Pharmacotherapy 23 (8 Pt 2):3S-8S). PEGylation also can be used in the delivery of nucleic acid molecules in vivo. For example, PEGylation of adenovirus can increase stability and gene transfer (see, e.g., Cheng et al. (2003) Pharm. Res. 20(9):1444-51).

[0560] Suitable polymeric molecules for attachment to the hyaluronan degrading enzymes, including hyaluronidases, include, but are not limited to, polyethylene glycol (PEG) and PEG derivatives such as methoxy-polyethylene glycols (mPEG), PEG-glycidyl ethers (Epox-PEG), PEG-oxycarbonylimidazole (CDI-PEG), branched PEGs, and polyethylene oxide (PEO) (see e.g. Roberts et al., Advanced Drug Delivery Review (2002) 54: 459-476; Harris and Zalipsky, S (eds.) “Poly(ethylene glycol), Chemistry and Biological Applications” ACS Symposium Series 680, 1997; Mehvar et al., J. Pharm. Pharmaceut. Sci., 3(1):125-136, 2000; Harris, (2003) Nature Reviews Drug Discovery 2:214-221; and Tsubery, (2004) J Biol. Chem 279(37):38118-24). The polymeric molecule can be of a molecular weight typically ranging from about 3 kDa to about 60 kDa. In some embodiments the polymeric molecule that is conjugated to a protein, such as a hyaluronidase, for example a PH20, has a molecular weight of between or about between 5 to 60 kDa, such as at least or about at least or 5, 10, 15, 20, 25, 30, 35, 40, 45, 50, 55, 60 or more than 60 kDa.

[0561] PEGylated Soluble Hyaluronan Degrading Enzymes

[0562] The hyaluronan degrading enzyme used in the combinations and methods herein can be a PEGylated hyaluronan degrading enzyme, such as a PEGylated soluble hyaluronan degrading enzyme. In one example, it is a PEGylated soluble hyaluronidase, e.g. PEGylated PH20. Various methods of modifying polypeptides by covalently attaching (conjugating) a PEG or PEG derivative (i.e. “PEGylation”) are known in the art (see e.g., U.S. 2006/0104968; U.S. Pat. Nos. 5,672,662; 6,737,505; and U.S. 2004/0235734). Techniques for PEGylation include, but are not limited to, specialized linkers and coupling chemistries (see e.g., Roberts et al., Adv. Drug Deliv. Rev. 54:459-476, 2002), attachment of multiple PEG moieties to a single conjugation site (such as via use of branched PEGs; see e.g., Guiotto et al., Bioorg. Med. Chem. Lett. 12:177-180, 2002), site-specific PEGylation and/or mono-PEGylation (see e.g., Chapman et al., Nature Biotech. 17:780-783, 1999), and site-directed enzymatic PEGylation (see e.g., Sato, Adv. Drug Deliv. Rev., 54:487-504, 2002). Methods and techniques described in the art can produce proteins having 1, 2, 3, 4, 5, 6, 7, 8, 9, 10 or more than 10 PEG or PEG derivatives attached to a single protein molecule (see e.g., U.S. 2006/0104968).

[0563] Numerous reagents for PEGylation have been described in the art. Such reagents include, but are not limited to, N-hydroxysuccinimidyl (NETS) activated PEG, succinimidyl mPEG, mPEG₂-N-hydroxysuccinimide, mPEG succinimidyl alpha-methylbutanoate, mPEG succinimidyl propionate, mPEG succinimidyl butanoate, mPEG carboxymethyl 3-hydroxybutanoic acid succinimidyl ester, homobifunctional PEG-succinimidyl propionate, homobifunctional PEG propionaldehyde, homobifunctional PEG butyraldehyde, PEG maleimide, PEG hydrazide, p-nitrophenyl-carbonate PEG, mPEG-benzotriazole carbonate, propionaldehyde PEG, mPEG butryaldehyde, branched mPEG2 butyraldehyde, mPEG acetyl, mPEG piperidone, mPEG methylketone, mPEG “linkerless” maleimide, mPEG vinyl sulfone, mPEG thiol, mPEG orthopyridylthioester, mPEG orthopyridyl disulfide, Fmoc-PEG-NHS, Boc-PEG-NHS, vinylsulfone PEG-NHS, acrylate PEG-NHS, fluorescein PEG-NHS, and biotin PEG-NETS (see e.g., Monfardini et al., Bioconjugate Chem. 6:62-69, 1995; Veronese et al., J. Bioactive Compatible Polymers 12:197-207, 1997; U.S. Pat. Nos. 5,672,662; 5,932,462; 6,495,659; U.S. 6,737,505; U.S. Pat. Nos. 4,002,531; 4,179,337; 5,122,614; 5,324,844; 5,446,090; 5,612,460; 5,643,575; 5,766,581; 5,795,569; 5,808,096; 5,900,461; 5,919,455; 5,985,263; 5,990,237; 6,113,906; 6,214,966; 6,258,351; 6,340,742; 6,413,507; 6,420,339; 6,437,025; 6,448,369; 6,461,802; 6,828,401; U.S. 6,858,736; U.S. 2001/0021763; U.S. 2001/0044526; U.S. 2001/0046481; U.S. 2002/0052430; U.S. 2002/0072573; U.S. 2002/0156047; U.S. 2003/0114647; U.S. 2003/0143596; U.S. 2003/0158333; U.S. 2003/0220447; U.S. 2004/0013637; US 2004/0235734; WO0500360; U.S. 2005/0114037; U.S. 2005/0171328; U.S. 2005/0209416; EP 1064951; EP 0822199; WO 01076640; WO 0002017; WO 0249673; WO 9428024; and WO 0187925).

### Other Modifications

[0564] The hyaluronan degrading enzymes, such as the soluble hyaluronidases provided herein can include other modifications that increase serum half-life. These include sialation, modification with dextran, and linkage or fusion, directly or indirectly via a linker, to a polypeptide that confers a property, such as resistance to an endogenous protease and/or increased serum half-life. Exemplary of these is fusion, directly or indirectly via a linker, to alpha-1 antitrypsin and variants thereof (see SEQ ID NOs: 273-276) or a sufficient contiguous portion of the alpha-1 antitrypsin or variant to confer a property, such as resistance to an endogenous protease and/or increased serum half-life.

[0565] Also included are conjugates of the soluble PH20 hyaluronidase, such as Fc fusions, and alpha-1 antitrypsin fusions as described in U.S. Pat. No. 9,012,606, and other fusions that increase resistance to endogenous proteases to thereby increase serum half-life. The soluble hyaluronidase is fused to the N- or C-terminus of alpha-1 antitrypsin (SEQ ID NO:277) or to an alpha-1 antitrypsin variant (see, e.g., SEQ ID NOs: 273-276). A linker, for example, is a Gly-Ser linker or a Gly linker containing 2-6 Gly and/or Gly-Ser residues. The alpha-1 antitrypsin variant is selected from among alpha-1 antitrypsin monovariant (α1AT(P357N)) set forth as SEQ ID NO:273, alpha-1 antitrypsin divariant (P357N, S359T) set forth as SEQ ID NO:274, alpha-1 antitrypsin divariant (P357N, C232S) set forth as SEQ ID NO:275, and alpha-1 antitrypsin trivariant alAT (P357N, C232S, S359T) set forth as SEQ ID NO:276 (see, U.S. Pat. No. 9,012,606).

[0566] 2. Taxanes and Formulations Thereof

[0567] The combination therapy, including compositions, combinations and methods and use thereof, provided herein contains a taxane. Taxanes are generally poorly water soluble, which has limited their therapeutic use. In the compositions and combinations provided herein, the taxanes are provided as formulations that exhibit water solubility. In particular examples provided herein, the taxanes are provided as formulations that target and/or penetrate the stroma or cells of a tumor. Exemplary of such a taxane formulation is an albumin-bound taxane.

[0568] a. Taxanes

[0569] Taxanes are diterpenes that are produced from plants of the genus Taxus (yews). Taxanes are anti-mitotic agents that bind to tubulin and act to stabilize microtubule polymerization, thereby disrupting the normal equilibrium involved in microtubule assembly and deconstruction and retarding microtubule functioning. While taxanes promote formation of microtubules, they prevent depolymerization of the tubulin forming the microtubules of the mitotic spindle. Microtubules are essential to cell division and cells exposed to taxanes are arrested in the premitotic G2 phase and fail to divide. These drugs thus interfere with the cell division process as cells treated with these drugs are held in mitosis. This can eventually result in cell death due to unsuccessful mitosis.

[0570] Taxanes also generate reactive oxygen species (ROS), including O₂ and H₂O₂ accumulation, in treated cells. The accumulation of ROS is associated with direct cytotoxic activity of taxanes, including paclitaxel, as well as bystander effects on neighboring cells (see e.g. Alexandre et al. (2007) Cancer Res., 67:3512).

[0571] Taxanes for use in the compositions, combinations and methods provided herein include any diterpene compound that inhibits the depolymerization of tubulin. In particular, such taxanes also include any that result in the accumulation of ROS in treated cells. Taxanes include those that are purified forms of a naturally produced diterpene or those that are synthesized artificially. Taxanes includes those that are non-crystalline and/or amorphous. Taxanes also can include anhydrous forms of a taxane.

[0572] Paclitaxel (taxol) is a naturally occurring diterpenoid. It has the chemical name 5β,20-epoxy-1,2α,4,7β,10β,13α-hexahydroxytax-11-en-9-one 4,10-diacetate 2-benzoate. Taxol is found in the stem bark of the Western Yew, Taxus brevifolia, as well as in T. baccata and T. cuspidata. It was first isolated from the bark of the Pacific yew tree, Taxus brevifolia (Wani et al. (1971) J. Am. Chem. Soc., 93:2325). The core structure of paclitaxel contains four rings (six membered A and C rings, eight membered B ring and four membered D ring). The structure of paclitaxel is set forth below, with numbering shown using the conventional numbering system for this class of drugs.

[chemical structure]

[0573] Paclitaxel can be prepared by semi-synthetic methods from precursor chemicals called baccatins, which are derived from the needles and twigs of the European or Himalayan yew tree. For example, Paclitaxel can be prepared from baccatin by attachment of protecting groups to the hydroxyl groups of baccatin that are to become the hydroxyl groups of paclitaxel, converting the precursor baccatin to paclitaxel, and then removing the protecting groups from the hydroxyl groups to obtain paclitaxel. In addition, paclitaxel has been synthesized from simple precursors. (See, e.g., International PCT Publication No. WO93/10076, WO93/16059; U.S. Pat. Nos. 5,200,534 5,015,744; 4,960,790; Nicolaou (1993) Nature 364: 464-466; Nicolaou, K. C. et al. (1994) Nature, 367:630-634; and Holton et al. (1994) J. Am. Chem. Soc., 116: 1597-1600).

[0574] Docetaxel (taxotere) is another exemplary taxane for use in the combinations and compositions provided herein. Docetaxel has the chemical name 1,70,100-trihydroxy-9-oxo-5β,20-epoxytax-11-ene-2α,4,13α-triyl 4-acetate 2-benzoate 13-{(2R,3S)-3-[(tert-butoxycarbonyl)amino]-2-hydroxy-3-phenylpropanoate and has the structure set forth below with numbering shown using the conventional numbering system for this class of drugs.

[chemical structure]

[0575] Docetaxel is a semi-synthetic, second-generation taxane derived from a compound found in the European yew tree Taxus baccata. Docetaxel is an esterified product of 10-deacetyl baccatin III, which is extracted from the European yew tree. It differs from paclitaxel at two positions in its chemical structure: it lacks an acetate ester, and a tert-butyl carbamate ester exists on the phenylpropionate side chain instead of the benzyl amide in paclitaxel. Docetaxel, an analog of paclitaxel, is semisynthetically produced from 10-deacetyl baccatin III, a non-cytotoxic precursor extracted from the needles of Taxus baccata and esterified with a chemically synthesized side chain (Cortes and Pazdur, 1995, J. Clin. Oncol. 13(10):2643-55).

[0576] Taxanes for use in the compositions, combinations and methods provided herein include analogs, derivatives and prodrug forms of paclitaxel or docetaxel. Such taxane derivatives include those that exhibit improved aqueous solubility compared to paclitaxel or docetaxel. For example, taxane derivatives, analogs and prodrug forms include those where ring positions are modified or derivatized, and in particular where the 2′- and 7 or 10-position is derivatized with a suitable groups (see e.g. Fu et al. (2009) Current Medicinal Chemistry, 16:1-13).

[0577] For example, taxane derivatives, analogs or prodrug forms include, but are not limited to, water soluble taxols having various substituted acyl groups at 2′-O-position (see e.g. U.S. Pat. No. 4,942,184); water soluble taxols, whereby the 2′ and/or 7′ hydroxy is derivatized with a selected amino acid or an amino acid mimetic compound (see e.g. U.S. Pat. No. 4,960,790); sulfonated 2′-acryloyl, sulfonated 2′-O-acyl acid taxol and substituted 2′-benzoyl and 2′7-dibenzoyl taxol (see e.g. U.S. Pat. Nos. 5,352,805 and 5,411,984); 2′ and/or 7-O-ester and 2′- and/or 7-O-carbonate derivatives of taxol (see e.g. U.S. Pat. No. 5,817,840); taxane derivatives formed by conjugation with polymers such as polyethylene glycol, poly(L-glutamic acid), poly(L-aspartic acid) (see e.g. U.S. Pat. No. 5,977,163); prodrug forms of taxane possessing a phosphonooxy group at the C-7, C-10 and/or the 2′position of the side chain of a taxane (see e.g. WO9414787); salts of 2′-succinylpaclitaxel and 2′glutarylpaclitaxel (Deutch et al. (1989) J. Med. Chem., 32:788-792); 2′ and 7-amino acid derivatives of paclitaxel and their salts (Matthew et al. (1992) J. Med. Chem., 35:145-151; sulfonate derivatives (Zhao et al. (1991) J. Nat. Prod., 54:1607-1611; 7-phosphate paclitaxel analogues (Vyas et al. (1993) Bioorg. Med. Chem., Lett., 3:1357-1360); 2′ and 7-polyethylene glycol esters of paclitaxel (Greenwald et al. (1995) J. Org. Chem., 60:331-336; Greenwald et al. (1996) J. Med. Chem., 39:424-431); 2′ and 7-Phosphonoxyphenyl-propionate paclitaxel (Ueda et al. (1993) Bioorg. Med. Chem. Lett., 3:1761-1766); 2′ and 7-Methylpyridinium acetate analogues of paclitaxel (Nicolaou et al. (1994) Angew Chemie, 106:1672-1675); Paloma et al. (1994) Chem. Biol., 1:107-112); prodrug of paclitaxel with malic acid at the 2′ position (Damen et al. (2000) Bioorg. Med. Chem. Lett., 8:427-432); sulfonate salts of taxanes and in particular of taxol (U.S. Pat. No. 5,059,699); derivatives in which an acyl chain is attached to enhance the taxane's lipid solubility (see e.g. U.S. Pat. No. 6,482,850); trihydrate forms of docetaxel that exhibit greater stability than the anhydrous product (see e.g. U.S. Pat. Nos. 6,022,985 and 6,838,569); C-10 taxane derivatives, including those containing a carbamate moiety at the C-10 position (U.S. Pat. No. 8,138,361); hydrophobic taxane derivatives (U.S. Patent Publication No. US2009/0263483); and hydrazide containing carboxylate derivatives of taxanes (see e.g. U.S. Pat. No. 8,133,888).

[0578] b. Tumor- or Stromal-Targeted Taxanes

[0579] The taxane compounds provided in the compositions and combinations herein are generally prepared to target the tumor or stroma surrounding a tumor. The taxane in the compositions and combinations provided herein are also provided as solubilized or nanodispersed formulations that exhibit improved solubility.

[0580] The natural or semi-synthetically produced paclitaxel (taxol) suffers from problems such as low water solubility and non-specific targeting or localization. For example, taxanes, including paclitaxel and docetaxel, are very poorly water soluble (less than 10 μg/mL), and as a result, cannot be practically formulated with an aqueous medium for intravenous administration. To combat the water solubility problems, current formulations of paclitaxel are formulated for intravenous administration to patients with cancer in a solution with polyoxyethylated castor oil (Polyoxyl 35 or Cremophor®) as the primary solvent/surfactant, with high concentrations of ethanol employed as co-solvent. Like paclitaxel, docetaxel is very poorly soluble in water. The solvent/surfactant used to dissolve docetaxel is polysorbate 80 (Tween 80) (Bissery et al. 1991 Cancer Res. 51(18):4845-52; Tomiak et al. 1994). The ethanol, Cremophor and/or Tween in the existing formulations are associated with the occurrence of hypersensitivity reactions, which can include severe skin rashes, hives, flushing, dyspnea, tachycardia and others.

[0581] Further, by increasing the specificity toward a cancer tissue, the taxane molecules exhibit less toxicity due to reduced systemic effects or exposure. Typically, a tumor-targeted taxane is a taxane, derivative, analog or prodrug thereof that is conjugated or linked directly or indirectly via a linker to a tumor recognition moiety. The tumor recognition moiety can be a monoclonal antibody, protein, peptide, lipid or macromolecular complex that recognizes a tumor-specific marker or moiety differentially expressed on cancer cells compared to normal cells. Cancer cells overexpress many tumor-specific markers or receptors that can be targeted to deliver a taxane.

[0582] The tumor-targeted taxane can be provided as micelles, nanoparticles, microspheres, liposomes or hydrogel formulations. Such formulations can be used in order to encapsulate active ingredients such as taxanes that can exhibit low solubility in aqueous medium. Such formulations are well-known to one of skill in the art. In some examples, the delivery vehicle is coated or conjugated with the tumor-targeting moiety, such as a macromolecular complex, monoclonal antibody, protein, peptide or lipid. Hence, in some examples, the drug delivery platform encapsulates the taxane, and itself displays a targeting ligand or other polymeric coating on the surface to effect tumor targeting.

[0583] Exemplary tumor-targeted taxanes and formulations thereof, contain a tumor targeting moiety that is a macromolecule such poly-L-glutamate (PGA-TXL, Xyotax; Li et al. (1998) Cancer Res., 58:2404-2409); a monoclonal antibody specific against a tumor marker, such as p140 TrkA or p75 receptors (Guillemard and Saragovi (2001) Cancer Res., 61:694) or anti-epidermal growth factor receptor (i.e. anti-EGFR monoclonal antibody, such as cetuximab; Safavy et al. (2003) Bioconjug., 14:302-10; Ojima et al. (2002) J. Med. Chem., 45:5620-3), anti-HER2 (Herceptin, trastuzumab, Cirstoiu-Hapca et al. (2010) J. Control Release, 144:324-31); a polyunsaturated fatty acid such as docosahexaenoic acid (DHA; Bradley et al. (2001) Clin. Cancer Research, 7:3229-38), linolenic acid or linoleic acid (Kuznetsova et al. (2006) Bioorg. Med. Chem. Lett., 15:974-7); a peptide such as a 7-amino acid synthetic peptide designated BBN[7-13] that binds to the cell surface bombesin/gastrin-releasing peptide (BBN/GRP) (Safavy et al. (1999) J. Med. Chem., 42:4919-4924), an LRP-1 targeted 19 amino acid peptide angiopep-2 (Wen et al. (2011) Molecular Cancer Therapeutics, 10 (11 Suppl):Abstract B49), an octapeptide that is cleaved by matrix metalloprotease 2 (MMP2; Yamada et al. (2010) Cancer Biology and Therapy, 9:192-203), an RGD peptide (see e.g. Zhao et al. (2009) J. Drug Target, 17:10-8); proteins that target tumor-specific receptors such as vitamin receptors, including biotin (vitamin H or B-7, folate or folic acid, vitamin B12 or riboflavin (see e.g. Chen et al. (2010) Biconjug. Chem., 21:979-987, Li et al. (2011) International Journal of Nanomedicine, 6:1167-1184); hyaluronic acid (HA) (Auzenne et al. (2007) Neoplasia, 9:479-486); transferrin (Sahoo et al. (2004) Int. J. Cancer, 112:335-40); and albumin.

[0584] Albumin-Bound Taxane

[0585] Exemplary of a soluble polymer-drug complex is an albumin-conjugated taxane. Albumin is a natural carrier of endogenous hydrophobic molecules, such as vitamins or hormones. In addition to acting as a carrier, albumin also facilitates endothelial transcytosis of protein-bound plasma constituents by binding to gp60 on the surface of endothelial cells, which effects caveolae-mediated transcytosis. Albumin also is able to bind to secreted protein acid rich in cysteine (SPARC, also known as osteonectin), which is present on many tumor cells. Hence, albumin promotes tumor cell accumulation of albumin-bound drugs.

[0586] Albumin includes human serum albumin (HSA) as well as non-human albumin such as bovine serum albumin (BSA). HSA is a highly soluble globular protein of Mᵣ 65 K and contains 585 amino acids (SEQ ID NO:211). HSA is the most abundant protein in the plasma and accounts for 70-80% of the colloid osmotic pressure of human plasma. The amino acid sequence of HSA contains a total of 17 disulphide bridges, one free thiol (Cys 34), and a single tryptophan (Trp 214).

[0587] Human serum albumin (HSA) has multiple hydrophobic binding sites (a total of eight for fatty acids, an endogenous ligand of HSA) and has been shown to bind a diverse set of pharmaceutical agents, especially neutral and negatively charged hydrophobic compounds (Goodman et al., The Pharmacological Basis of Therapeutics, 9^{th} ed., McGraw-Hill New York (1996)). Two high affinity binding sites have been proposed in subdomains IIA and IIIA of HSA, which are highly elongated hydrophobic pockets with charged lysine and arginine residues near the surface which function as attachment points for polar ligand features (see, e.g., Fehske et al., Biochem. Pharmcol., 30, 687-92 (1981), Vorum, Dan. Med. Bull., 46, 379-99 (1999), Kragh-Hansen, Dan. Med. Bull., 37:57-84 (1990), Curry et al., Nat. Struct. Biol., 5, 827-35 (1998), Sugio et al., Protein. Eng., 12, 439-46 (1999), He et al., Nature, 358, 209-15 (1992), and Carter et al., Adv. Protein. Chem., 45, 153-203 (1994)). Paclitaxel and docetaxel have been shown to bind HSA (see, e.g., Paal et al., Eur. J. Biochem., 268(7), 2187-91 (2001), Purcell et al., Biochim. Biophys. Acta, 1478(1), 61-8 (2000), Altmayer et al., Arzneimittelforschung, 45, 1053-6 (1995), Garrido et al., Rev. Esp. Anestestiol. Reanim., 41, 308-12 (1994); and Urien et al., Invest. New Drugs, 14(2), 147-51 (1996)).

[0588] The weight ratio of albumin to taxane in the composition is about or less than 20:1 or less, such as 19:1, 18:1, 17:1, 16:1, 15:1, 14:1, 13:1, 12:1, 11:1, 10:1, 9:1, 8:1, 7:1, 6:1, 5:1 or less, and generally is at least or about at least or is 9:1. The resulting product can be generated to be free of solvent and/or surfactant. The taxane is coated with the albumin. The taxane/albumin nanoparticles generally have an average diameter of no greater than 200 nm, and generally 100 nm to 200 nm, such as an average diameter of 130 nm.

[0589] For example, albumin-bound taxanes include albumin-bound (nab-)paclitaxel (e.g. Abraxane, American Bioscience, Inc. (Santa Monica, Calif.); also described in U.S. Pat. Nos. 5,439,686 and 6,749,868) or albumin-bound-docetaxel (e.g. described in, for example, U.S. Pat. application Pub. Nos. 20080161382, 20070117744 and 20070082838). Human albumin functions as a surface-active polymer providing charge and steric stabilization to the paclitaxel nanoparticles to prevent aggregation. Stabilization is achieved by the fact that albumin adsorbs onto the surface of the paclitaxel nanoparticles, thus creating a sheet that functions as a surface-active polymer preventing aggregation of paclitaxel particles. The interaction between paclitaxel and human albumin is weak and both substances freely dissociate after reconstitution. Thus, when reconstituted and injected into the bloodstream, the paclitaxel concentration decreases rapidly and the albumin particles are believed to disassociate into individual albumin molecules and then circulate with the paclitaxel still attached. In particular, albumin-bound paclitaxel (e.g. nab-paclitaxel or Abraxane) can be used as a colloidal suspension derived from a lyophilized formulation of paclitaxel and human serum albumin diluted in saline solution (0.9% NaCl). The resulting drug particle complex is stabilized at an average size of 130 nm. Nanoparticles containing other taxanes, such as any described herein above, also can be generated and used, and can contain the same characteristics as described above.

[0590] 3. Further Chemotherapeutic Agent (e.g. Nucleoside Analog)

[0591] Optionally, an additional chemotherapeutic agent whose activity is improved or increased by co-administration with one or both of a polymer-conjugated hyaluronan-degrading enzyme and/or a taxane formulation can be included in the combination therapy provided herein. For example, one or more nucleoside analogs, in particular anti-metabolites, can be included in the combination therapy provided herein. After they enter the cell, nucleoside analogs are successively phosphorylated to nucleoside 5′-mono-phosphates, di-phosphates and tri-phosphates. For example, generally, nucleoside analogs are converted to an active compound by phosphorylation of the nucleoside to its triphosphate (e.g. by diphosphate kinases), which then is able to compete with a physiologic nucleoside (e.g. dCTP) as a substrate for incorporation into DNA. Hence, nucleoside analogs mimic physiologic nucleosides. Once incorporated, the analog is an inefficient substrate, thereby stalling replication and/or causing chain termination. See Sampath et al. (2003), Oncogene, 22:9063-9074 for a review of nucleoside analogs. Since nucleoside analogs require conversion into an active form, they are generally prodrugs that must be phosphorylated to an active form.

[0592] Nucleoside analogs for use in the compositions and combinations herein include purine and pyrimidine nucleoside analogs, as well as derivatives and prodrug forms thereof. Pyrimidine nucleoside analogs include, but are not limited to, fluoropyrimidine 5-fluorouracil (5-FU; fluorouracil), 5-fluoro-2′-deoxycytidine (FCdR), arabinosylcytosine (ara-C; also called cytosine arabinoside or cytarabine), gemcitabine (2′-deoxy-2′,2′-difluorocytidine), troxacitabine (beta-L-dioxolane cytidine, BCH-4556), decitabine (5-aza-2′-deoxycytidine), Azacytidine (4-amino-1-β-D-ribofuranosyl-1,3,5-triazin-2(1H)-one), pseudoisocytidine (psi ICR), 5-aza-2′-deoxy-2′,2′-difluorocytidine; 5-aza-2′-deoxy-2′-fluorocytidine; 1-β-D-ribofuranosyl-2(1H)-pyrimidinone (Zebularine); 2′,3′-dideoxy-5-fluoro-3′-thiacytidine (Emtriva); 2′-cyclocytidine (Ancitabine); 1-β-D-arabinofuranosyl-5-azacytosine (Fazarabine or ara-AC); 6-azacytidine (6-aza-CR); 5,6-dihydro-5-azacytidine (dH-aza-CR); N⁴-pentyloxycarbonyl-5′-deoxy-5-fluorocytidine (Capecitabine); N⁴-octadecyl-cytarabine; and elaidic acid cytarabine, and derivatives and prodrug forms thereof. Purine nucleoside analogs include, for example, fludarabine, cladribine, clofarabine, nelarabine, forodesine, pentostatin and tezacitabine, and derivatives and prodrug forms.

[0593] Other prodrug forms of nucleoside analogs are known or can be generated. For example, other prodrug forms include those that are modified to alter properties of cellular uptake and/or resistance to deactivation by deaminase (discussed below). For example, such prodrug forms can permit improved oral absorption and/or increased or specific tissue targeting (Li et al. (2008) Journal Pharm. Science, 97:1109-1134).

[0594] The antitumor activity of some nucleoside analogs has been limited by the low cytotoxic levels that can be achieved. This is largely due to inactivation of the enzymes that can occur in many tissues. For example, metabolic inactivation of some nucleoside analogs can be caused by deamination. Deamination can be catalyzed by a nucleotide-specific deaminase, such as adenosine deaminase or cytidine deaminase (cdA). Thus, some cancer drugs are metabolized by an organism's naturally occurring enzymes such as adenosine deaminase (ADA, EC 3.5.4.4) and cytidine deaminase (CDA, also termed cytosine nucleoside deaminase, cytidine aminohydrolase, or EC 3.5.4.5). These enzymes function to deaminate natural aminopurine and aminopyrimidine nucleosides, respectively, in human and other organisms. These enzymes also convert active nucleoside-based cancer drugs into inactive metabolites. For example, CDA is a component of the pyrimidine salvage pathway. It converts cytidine and deoxycytidine to uridine and deoxyuridine, respectively, by hydrolytic deamination (Cacciamani et al. (1991) Arch. Biochem. Biophys. 290:285-292; Wentworth and Wolfenden (1978) Methods Enzymol. 57:401-407; Wisdom and Orsi (1967) Biochem. J. 104:7P). It also deaminates a number of synthetic cytosine analogs which are clinically useful drugs, such as ara-C and others as discussed below (Eliopoulos et al. (1998) Cancer Chemother. Pharmacol. 42:373-378; Kees et al. (1989) Cancer Res. 49:3015-3019; Antiviral Chem. Chemother. (1990) 1:255-262). For example, the half-life of gemcitabine in plasma is approximately 10 minutes, due to rapid deamination by the endogenous enzyme deoxycytidine deaminase to the corresponding uracil derivative (dFdU) (P. G. Johnston et al., Cancer Chromatography and Biological Response Modifiers, Annual 16, 1996, Chap. 1, ed. Pinedo H. M. et al.).

[0595] For example, the purine nucleoside drug arabinosyladenine (fludarabine, ara-A) is deaminated by ADA; the resulting compound, with the parent amino group replaced with hydroxyl, is inactive as an antitumor agent compared to the parent compound. Similarly, the drug arabinosylcytosine (also termed cytarabine Ara-C(or AraC); 4-Amino-1-(β-D-arabinofuranosyl)-2(1H)-pyrimidinone; Cytosine arabinoside; or 1-(β-D-Arabinofuranosyl)cytosine) is metabolically degraded by CDA into inactive arabinosyluracil. Gemcitabine, decitabine, azacytidine and others are also similarly inactivated. The deamination of nucleoside analogs, such as cytosine nucleosides and their analogs (e.g. cytarabine and gemcitabine), prevents the accumulation of their toxic intracellular triphosphate derivatives that act as the active metabolites.

[0596] Conversion of the cytosine compounds to the uridine derivatives usually confers loss of therapeutic activity or addition of side-effects. It has also been shown that cancers that acquire resistance to cytosine analog drugs often overexpress CDA (Leuk. Res. 1990, 14, 751-754). Leukemic cells and solid tumors expressing a high level of CDA can manifest resistance to cytosine antimetabolites and thereby limit the antineoplastic activity of such therapeutics (Biochem. Pharmacol. 1993, 45:1857-1861). Resistance to nucleoside analogs can require increased dosages, continued infusions or repeat administrations. These effects can lead to serious adverse effects, especially related to myelosuppression and immunosuppression.

[0597] Reactive oxygen species (ROS) are associated with the inactivation of enzymes, including nucleoside deaminases. Taxanes are known to induce intratumoral ROS, and thus can inactivate the activity of nucleoside deaminases (see e.g. Frese et al. (2012) Cancer Discovery, 2:260-269).

[0598] Hence, for purposes herein, exemplary nucleoside analogs for use in the combinations and compositions provided herein are those that are substrates for a deaminase, and that thereby are inactivated. For example, the deaminase can be a cytidine deaminase or an adenosine deaminase. The intratumoral level and activity of such analogs can be greatly increased in combination therapy with a polymer-conjugated hyaluronan degrading enzyme and a taxane formulation. Exemplary of such nucleoside analogs include, but are not limited to, fludarabine, cytarabine, gemcitabine, decitabine and azacytidine or derivatives thereof. In particular examples, the nucleoside analog is one that can treat solid tumors, such as bladder, breast, lung, ovarian, pancreatic and other cancers.

[0599] Any of the nucleoside analogs provided herein can be formulated as liposomes, microparticles, nanoparticles, or as polymer-conjugates. For example, formulations can be prepared in order to control delivery and/or increase half-lives of the administered drugs. For example, exemplary liposomal formulations are known (see e.g. U.S. Pat. Nos. 5,736,155 and 8,022,279).

[0600] 1. Exemplary Nucleoside Analogs

[0601] Included are any nucleoside analogs and pro-drugs thereof known to those skill in the art, including, but not limited to, the following, and the others listed elsewhere herein.

[0602] i) Gemcitabine

[0603] Gemcitabine (2′,2′-difluorodeoxycytidine, dFdC) is a difluorinated analog of deoxycytidine and thus is a nucleoside analog or an antimetabolite. After it enters cells, intracellular phosphorylation by nucleoside monophosphate and diphosphate kinases produces 5′-diphosphate (dFdCDP) and 5′-triphosphate (dFdCTP) derivatives, respectively. Gemcitabine triphosphate acts as a fraudulent base, competing with dCTP for incorporation into DNA. If incorporated into DNA, only one more nucleotide can be incorporated before DNA chain elongation is halted. DNA polymerase epsilon is then unable to remove the gemcitabine nucleotide and repair the growing DNA strands (masked chain termination).

[0604] Gemcitabine is marketed as Gemzar®, which is a lyophilized powder formulation. Gemzar®, gemcitabine for injection, USP, contains Gemcitabine HCl that is 2′-deoxy-2′,2′-difluorocytidine monohydrochloride (β-isomer). Gemzar® is supplied as an intravenous formulation containing either 200 mg or 1 g of gemcitabine HCl (expressed as free base) formulated with mannitol (200 mg or 1 g, respectively) and sodium acetate (12.5 mg or 62.5 mg, respectively) as a sterile lyophilized powder. pH of the formulation can be adjusted by addition of hydrochloric acid and/or sodium hydroxide. A process for making this gemcitabine, and methods for using it are described, for example, in U.S. Pat. Nos. 5,464,826 and 4,808,614. Gemzar® gemcitabine is approved for the treatment of pancreatic cancer, breast cancer and non-small cell lung cancer (NSCLC) and is being evaluated for ovarian cancer. In addition Gemzar® gemcitabine can be used in the treatment of HCV as well as a modulator of immune function (see U.S. Pat. No. 6,555,518). Gemzar® gemcitabine can be administered by intravenous infusion at a dose of approximately 1000 to 1250 mg/m² over 30 minutes, once weekly for up to 7 weeks followed by a week of rest from treatment.

[0605] Synthetic derivatives of gemcitabine, including several prodrug forms, are known (see for example, Ishitsuka et al, International Publication No. WO03/043631; Alexander et al. (2003) J. Med. Chem., 46: 4205-4208; U.S. Pat. No. 6,303,569; Guo et al. (2001) Cancer Chemother. Pharmacol., 48:169-176; International Publication No. WO01/21135; Di Stefano et al. (1999) Biochem. Pharmacol., 57: 793-799; Guo et al. (1999) J. Org. Chem., 64: 8319-8322; International Publication No. WO99/33483; International Publication No. WO98/32762; International Publication No. WO98/00173; U.S. Pat. Nos. 5,606,048; 5,594,124; European Patent Application No. EP712860; U.S. Pat. Nos. 5,521,294; 5,426,183; 5,401,838; European Patent No. EP0376518; European Patent Application No. EP577303; European Patent Application No. EP576230; Chou et al. (1992) Synthesis, 565-570; Richardson et al. (1992) Nucleic Acid Res., 20: 1763-1768; Baker et al. (1991) J. Med. Chem., 34: 1879-1884; International Publication No. WO91/15498; European Patent Application No. EP329348; European Patent Application No. EP272891).

[0606] Exemplary improved prodrugs include, but are not limited to, gemcitabine elaidate (also termed 9(E)-Octadecenoic acid 2′-deoxy-2′,2′-difluorocytidin-5′-yl ester; 2′-Deoxy-2′,2′-difluoro-5′-O-[9(E)-octadecenoyl]cytidine; CP-4126; or CAS Registry no. 210829-30-4); Azelaic acid gemcitabine ester meglumine salt (also termed 1-[5-O-(9-Carboxynonanoyl)-β-D-arabinofuranosyl]cytosine meglumine salt); other salts of Azelaic acid gemcitabine ester; and 1-[4-(2-Propylpentanamido)-2-oxo-1H-pyrimidin-1-yl]-2-deoxy-2,2-difluoro-β-D-ribofuranose (also termed LY-2334737). For example, CP-4126 is a lipophilic, unsaturated fatty acid ester derivative of gemcitabine. Due to its lipophilicity, it exhibits an increased cellular uptake and accumulation, thereby resulting in an increased conversion to active metabolites.

[0607] Compared to other nucleoside analogs, gemcitabine and derivatives or prodrugs thereof, exhibits greater antitumor activity, particularly towards solid tumors. Antitumor activity of gemcitabine has been demonstrated against cancers of the pancreas, small-cell and non-small cell lung cancer, and bladder cancer.

[0608] A relatively hydrophilic compound, gemcitabine has limited ability to permeate plasma membranes via passive diffusion. Thus, increased dosages or infusions are required. Gemcitabine administration has been associated with some side effects. The administered dosages or longer infusion times to maintain cytotoxic levels can be associated with myelotoxicity, and other adverse effects such as elevated liver transaminase enzyme, nausea, vomiting, and skin rash.

[0609] ii) Cytarabine

[0610] Cytarabine is a nucleoside analog that was originally isolated from the sponge Cryptotethya crypta. Cytarabine is phosphorylated to ara-CTP, which can compete with dCTP. ara-CTP also can become incorporated into the DNA and interfere with chain polymerization and DNA repair. Cytarabine can be inactivated by cytidine deaminase.

[0611] Cytarabine has been principally used in hematological cancers. Synthetic derivatives of cytarabine have been developed and shown to exhibit efficacy against solid tumors. These include, for example, gemcitabine (see above). For example, ester derivatives of cytarabine are known. Exemplary of such a derivative is CP-4055, which is the 5′-elaidic acid ester of cytarabine (see e.g. Breistol et al. (1999) Cancer Res., 59:2944).

[0612] Due to the problems maintaining sufficient levels of cytotoxic effects, the administered dosages or increased infusion times can cause side effects such as myelosuppression and other specific tissue injuries.

[0613] iii) Decitabine

[0614] Decitabine (5-aza-2′-deoxycytidine, 5-aza-CdR) is a pyrimidine nucleoside analog of cytidine. Decitabine was initially prepared by cyclization of peracylglycosyl isocyanates (Pliml and Sorm (1964) Collect. Czech. Chem. Commun. 29:2576-2577). Two isomeric forms of decitabine can be distinguished. The β-anomer is the active form. Decitabine is the active ingredient in the commercially marketed DACOGEN™ product, in the form of a sterile lyophilized powder for injection.

[0615] Inside the cell, decitabine is first converted into its active form, the phosphorylated 5-aza-deoxycytidine, by deoxycytidine kinase which is primarily synthesized during the S phase of the cell cycle. The affinity of decitabine for the catalytic site of deoxycytidine kinase is similar to the natural substrate, deoxycytidine (Momparler et al. (1985) Pharmacol Ther 30:287-299). After conversion to its triphosphate form by deoxycytidine kinase, decitabine is incorporated into replicating DNA at a rate similar to that of the natural substrate, dCTP (Bouchard and Momparler (1983) Mol. Pharmacol. 24:109-114).

[0616] One of the functions of decitabine is its ability to specifically and potently inhibit DNA methylation. Methylation of cytosine to 5-methylcytosine occurs at the level of DNA. Incorporation of decitabine into the DNA strand has a hypomethylation effect. Each class of differentiated cells has its own distinct methylation pattern. After chromosomal duplication, in order to conserve this pattern of methylation, the 5-methylcytosine on the parental strand serves to direct methylation on the complementary daughter DNA strand. Substituting the carbon at the 5 position of the cytosine for a nitrogen interferes with this normal process of DNA methylation. The replacement of 5-methylcytosine with decitabine at a specific site of methylation produces an irreversible inactivation of DNA methyltransferase, presumably due to formation of a covalent bond between the enzyme and decitabine (Juttermann et al. (1994) Proc. Natl. Acad. Sci. USA 91:11797-11801). By specifically inhibiting DNA methyltransferase, the enzyme required for methylation, the aberrant methylation of the tumor suppressor genes can be prevented.

[0617] Methods of preparing decitabine, and particularly the β-anomer, are known in the art (see e.g. U.S. Pat. Nos. 3,350,388; 3,817,980; 4,209,613; U.S. published Appl. No. US2012/0046457; International Appl. Publ. No. WO2008/101448; Winkley et al. (1970) J Org Chem, 35:491-495; Piskala et al. (1978) Nucleic Acid Research, 1: s109-s114; Ben-Hattar et al. (1986) J Org Chem, 51:3211-3213.) Decitabine can be formulated by standard methods known in the art. The formulations can be liquid or lyophilized formulations. For example, decitabine is commonly supplied as a sterile lyophilized powder for injection, together with buffering salt, such as potassium dihydrogen phosphate, and pH modifier, such as sodium hydroxide. For example, decitabine is supplied by SuperGen, Inc., as lyophilized powder packed in 20 mL glass vials, containing 50 mg of decitabine, monobasic potassium dihydrogen phosphate, and sodium hydroxide. When reconstituted with 10 mL of sterile water for injection, each mL contain 5 mg of decitabine, 6.8 mg of KH₂PO₄, and approximately 1.1 mg NaOH. The pH of the resulting solution is 6.5-7.5. The reconstituted solution can be further diluted to a concentration of 1.0 or 0.1 mg/mL in cold infusion fluids, i.e., 0.9% Sodium Chloride; or 5% Dextrose; or 5% Glucose; or Lactated Ringer's. The unopened vials are typically stored under refrigeration (2-8° C.; 36-46° F.), in the original package. Liquid formulations also are known (see e.g. U.S. Pat. No. 6,982,253).

[0618] Decitabine exhibits a short half-life in vivo because of the deamination of decitabine to 5-aza-2′-deoxyuridine, which is catalyzed by cytidine deaminase (Chabot et al. (1983) Biochemical Pharmacology 22:1327-1328). The estimated K. of decitabine was 250 μM for the enzyme purified from human liver as compared to the Kₘ of 12 μM for the natural substrate, deoxycytidine. The rate of deamination of deoxycytidine was about 6-fold greater than that of decitabine by cytidine deaminase at equal concentrations. Due to the short half-life, decitabine is most typically administrated to patients by injection, such as by a bolus I.V. injection, continuous I.V. infusion, or I.V. infusion.

[0619] The length of I.V. infusion can be limited by the decomposition of decitabine in aqueous solutions. Derivatives of decitabine exist that are more stable in aqueous solutions (see e.g. U.S. Pat. No. 7,250,416).

[0620] iv) Azacytidine

[0621] 5-azacytidine (National Service Center designation NSC-102816; CAS Registry Number 320-67-2), also known as azacitidine, AZA, or 4-amino-113-D-ribofuranosyl-1,3,5-triazin-2(1H)-one, is an analog of decitabine (see e.g. Hanna et al. (1998) Collect. Czech. Chem. Commun., 63:222-230). It is marketed as the drug product sold under the trademark VIDAZA®. Azacytidine is a nucleoside analog, more specifically a cytidine analog. It is an antagonist of its natural nucleoside. For example, the only structural difference between azacytosine and cytosine is the presence of a nitrogen atom at position 5 of the cytosine ring in azacytosine as compared to a carbon at this position for cytosine.

[0622] Methods of preparing azacytidine, and particularly methods that avoid the use of water, are known in the art (U.S. Pat. Nos. 3,350,388; 8,058,424; Winkley and Robins (1970) J. Org. Chem., 35:491; Piskala and Sorm (1978) Nucl. Acid. Chem., 1:435; and Vorbrueggen et al. (1981) Chemische Berichte, 114:1234-1255).

[0623] Azacytidine is a substrate for cytidine deaminase (see e.g. Voytek et al. (1977) Cancer Res., 37:1956-61). In order to exhibit cytotoxic effects in vivo, high concentrations or continuous infusions are required. Side effects include decreased white and red blood cell and platelet count, nausea, vomiting, fatigue, diarrhea, among other effects.

[0624] 2. Other Anti-Cancer Therapeutics

[0625] Lists of examples of other anti-cancer therapeutic agents include those listed below in section H.4.b. These include chemotherapeutic agents, such as platinum compounds. Other therapeutic anti-cancer agents include, but are not limited to, oncolytic viral therapies, immunotherapies, therapeutic antibodies, CAR-T therapy and other cell therapies. Anti-cancer agent/treatment regimens for particular cancers are known to those of skill in the art. Soluble hyaluronidases in a form for administration for treatment of cancers, such as the modified hyaluronidases described herein, can be combined with known regimens to improve treatments in certain subjects. The methods herein for selecting subjects for treatment, can be used for identifying subjects who will benefit from a treatment or combination therapy that includes a hyaluronidase.

### E. Methods of Producing Nucleic Acids and Encoded Polypeptides of Hyaluronan Degrading Enzymes

[0626] Polypeptides of a hyaluronan degrading enzyme, such as a soluble hyaluronidase, set forth herein, can be obtained by methods well known in the art for protein purification and recombinant protein expression. Any method known to those of skill in the art for identification of nucleic acids that encode desired genes can be used. Any method available in the art can be used to obtain a full length (i.e., encompassing the entire coding region) cDNA or genomic DNA clone encoding a hyaluronidase, such as from a cell or tissue source. Modified or variant soluble hyaluronidases, can be engineered from a wildtype polypeptide, such as by site-directed mutagenesis.

[0627] Polypeptides can be cloned or isolated using any available methods known in the art for cloning and isolating nucleic acid molecules. Such methods include PCR amplification of nucleic acids and screening of libraries, including nucleic acid hybridization screening, antibody-based screening and activity-based screening.

[0628] Methods for amplification of nucleic acids can be used to isolate nucleic acid molecules encoding a desired polypeptide, including for example, polymerase chain reaction (PCR) methods. A nucleic acid containing material can be used as a starting material from which a desired polypeptide-encoding nucleic acid molecule can be isolated. For example, DNA and mRNA preparations, cell extracts, tissue extracts, fluid samples (e.g. blood, serum, saliva), samples from healthy and/or diseased subjects can be used in amplification methods. Nucleic acid libraries also can be used as a source of starting material. Primers can be designed to amplify a desired polypeptide. For example, primers can be designed based on expressed sequences from which a desired polypeptide is generated. Primers can be designed based on back-translation of a polypeptide amino acid sequence. Nucleic acid molecules generated by amplification can be sequenced and confirmed to encode a desired polypeptide.

[0629] Additional nucleotide sequences can be joined to a polypeptide-encoding nucleic acid molecule, including linker sequences containing restriction endonuclease sites for the purpose of cloning the synthetic gene into a vector, for example, a protein expression vector or a vector designed for the amplification of the core protein coding DNA sequences. Furthermore, additional nucleotide sequences specifying functional DNA elements can be operatively linked to a polypeptide-encoding nucleic acid molecule. Examples of such sequences include, but are not limited to, promoter sequences designed to facilitate intracellular protein expression, and secretion sequences, for example heterologous signal sequences, designed to facilitate protein secretion. Such sequences are known to those of skill in the art. Additional nucleotide residues sequences such as sequences of bases specifying protein binding regions also can be linked to enzyme-encoding nucleic acid molecules. Such regions include, but are not limited to, sequences of residues that facilitate or encode proteins that facilitate uptake of an enzyme into specific target cells, or otherwise alter pharmacokinetics of a product of a synthetic gene. For example, enzymes can be linked to PEG moieties.

[0630] In addition, tags or other moieties can be added, for example, to aid in detection or affinity purification of the polypeptide. For example, additional nucleotide residues sequences such as sequences of bases specifying an epitope tag or other detectable marker also can be linked to enzyme-encoding nucleic acid molecules. Exemplary of such sequences include nucleic acid sequences encoding a His tag (e.g., 6×His, SIH; SEQ ID NO:54) or Flag Tag (DYKDDDDK; SEQ ID NO:55).

[0631] The identified and isolated nucleic acids can then be inserted into an appropriate cloning vector. A large number of vector-host systems known in the art can be used. Possible vectors include, but are not limited to, plasmids or modified viruses, but the vector system must be compatible with the host cell used. Such vectors include, but are not limited to, bacteriophages such as lambda derivatives, or plasmids such as pCMV4, pBR322 or pUC plasmid derivatives or the Bluescript vector (Stratagene, La Jolla, Calif.). Other expression vectors include the HZ24 expression vector exemplified herein. The insertion into a cloning vector can, for example, be accomplished by ligating the DNA fragment into a cloning vector which has complementary cohesive termini. Insertion can be effected using TOPO cloning vectors (Invitrogen, Carlsbad, Calif.). If the complementary restriction sites used to fragment the DNA are not present in the cloning vector, the ends of the DNA molecules can be enzymatically modified. Alternatively, any site desired can be produced by ligating nucleotide sequences (linkers) onto the DNA termini; these ligated linkers can contain specific chemically synthesized oligonucleotides encoding restriction endonuclease recognition sequences. In an alternative method, the cleaved vector and protein gene can be modified by homopolymeric tailing. Recombinant molecules can be introduced into host cells via, for example, transformation, transfection, infection, electroporation and sonoporation, so that many copies of the gene sequence are generated.

[0632] In specific embodiments, transformation of host cells with recombinant DNA molecules that incorporate the isolated protein gene, cDNA, or synthesized DNA sequence enables generation of multiple copies of the gene. Thus, the gene can be obtained in large quantities by growing transformants, isolating the recombinant DNA molecules from the transformants and, when necessary, retrieving the inserted gene from the isolated recombinant DNA.

[0633] 1. Vectors and Cells

[0634] For recombinant expression of one or more of the desired proteins, such as any hyaluronan degrading enzyme polypeptide described herein, the nucleic acid containing all or a portion of the nucleotide sequence encoding the protein can be inserted into an appropriate expression vector, i.e., a vector that contains the necessary elements for the transcription and translation of the inserted protein coding sequence. The necessary transcriptional and translational signals also can be supplied by the native promoter for enzyme genes, and/or their flanking regions.

[0635] Also provided are vectors that contain a nucleic acid encoding the enzyme. Cells containing the vectors also are provided. The cells include eukaryotic and prokaryotic cells, and the vectors are any suitable for use therein.

[0636] Prokaryotic and eukaryotic cells, including endothelial cells, containing the vectors are provided. Such cells include bacterial cells, yeast cells, fungal cells, Archea, plant cells, insect cells and animal cells. The cells are used to produce a protein thereof by growing the above-described cells under conditions whereby the encoded protein is expressed by the cell, and recovering the expressed protein. For purposes herein, for example, the enzyme can be secreted into the medium.

[0637] Provided are vectors that contain a sequence of nucleotides that encodes the hyaluronan degrading enzyme polypeptide, in some examples a soluble hyaluronidase polypeptide, coupled to the native or heterologous signal sequence, as well as multiple copies thereof. The vectors can be selected for expression of the enzyme protein in the cell or such that the enzyme protein is expressed as a secreted protein.

[0638] A variety of host-vector systems can be used to express the protein coding sequence. These include but are not limited to mammalian cell systems infected with virus (e.g. vaccinia virus, adenovirus and other viruses); insect cell systems infected with virus (e.g. baculovirus); microorganisms such as yeast containing yeast vectors; or bacteria transformed with bacteriophage, DNA, plasmid DNA, or cosmid DNA. The expression elements of vectors vary in their strengths and specificities. Depending on the host-vector system used, any one of a number of suitable transcription and translation elements can be used.

[0639] Any methods known to those of skill in the art for the insertion of DNA fragments into a vector can be used to construct expression vectors containing a chimeric gene containing appropriate transcriptional/translational control signals and protein coding sequences. These methods can include in vitro recombinant DNA and synthetic techniques and in vivo recombinants (genetic recombination). Expression of nucleic acid sequences encoding protein, or domains, derivatives, fragments or homologs thereof, can be regulated by a second nucleic acid sequence so that the genes or fragments thereof are expressed in a host transformed with the recombinant DNA molecule(s). For example, expression of the proteins can be controlled by any promoter/enhancer known in the art. In a specific embodiment, the promoter is not native to the genes for a desired protein. Promoters which can be used include but are not limited to the SV40 early promoter (Bernoist and Chambon, Nature 290:304-310 (1981)), the promoter contained in the 3′ long terminal repeat of Rous sarcoma virus (Yamamoto et al. Cell 22:787-797 (1980)), the herpes thymidine kinase promoter (Wagner et al., Proc. Natl. Acad. Sci. USA 78:1441-1445 (1981)), the regulatory sequences of the metallothionein gene (Brinster et al., Nature 296:39-42 (1982)); prokaryotic expression vectors such as the β-lactamase promoter (Jay et al., (1981) Proc. Natl. Acad. Sci. USA 78:5543) or the tac promoter (DeBoer et al., Proc. Natl. Acad. Sci. USA 80:21-25 (1983); see also “Useful Proteins from Recombinant Bacteria”: in Scientific American 242:79-94 (1980); plant expression vectors containing the nopaline synthetase promoter (Herrara-Estrella et al., Nature 303:209-213 (1983)) or the cauliflower mosaic virus 35S RNA promoter (Gardner et al., Nucleic Acids Res. 9:2871 (1981)), and the promoter of the photosynthetic enzyme ribulose bisphosphate carboxylase (Herrera-Estrella et al., Nature 310:115-120 (1984)); promoter elements from yeast and other fungi such as the Gal4 promoter, the alcohol dehydrogenase promoter, the phosphoglycerol kinase promoter, the alkaline phosphatase promoter, and the following animal transcriptional control regions that exhibit tissue specificity and have been used in transgenic animals: elastase I gene control region which is active in pancreatic acinar cells (Swift et al., Cell 38:639-646 (1984); Ornitz et al., Cold Spring Harbor Symp. Quant. Biol. 50:399-409 (1986); MacDonald, Hepatology 7:425-515 (1987)); insulin gene control region which is active in pancreatic beta cells (Hanahan et al., Nature 315:115-122 (1985)), immunoglobulin gene control region which is active in lymphoid cells (Grosschedl et al., Cell 38:647-658 (1984); Adams et al., Nature 318:533-538 (1985); Alexander et al., Mol. Cell Biol. 7:1436-1444 (1987)), mouse mammary tumor virus control region which is active in testicular, breast, lymphoid and mast cells (Leder et al., Cell 45:485-495 (1986)), albumin gene control region which is active in liver (Pinkert et al., Genes and Devel. 1:268-276 (1987)), alpha-fetoprotein gene control region which is active in liver (Krumlauf et al., Mol. Cell. Biol. 5:1639-1648 (1985); Hammer et al., Science 235:53-58 1987)), alpha-1 antitrypsin gene control region which is active in liver (Kelsey et al., Genes and Devel. 1:161-171 (1987)), beta globin gene control region which is active in myeloid cells (Magram et al., Nature 315:338-340 (1985); Kollias et al., Cell 46:89-94 (1986)), myelin basic protein gene control region which is active in oligodendrocyte cells of the brain (Readhead et al., Cell 48:703-712 (1987)), myosin light chain-2 gene control region which is active in skeletal muscle (Shani, Nature 314:283-286 (1985)), and gonadotrophic releasing hormone gene control region which is active in gonadotrophs of the hypothalamus (Mason et al., Science 234:1372-1378 (1986)).

[0640] In a specific embodiment, a vector is used that contains a promoter operably linked to nucleic acids encoding a desired protein, or a domain, fragment, derivative or homolog, thereof, one or more origins of replication, and optionally, one or more selectable markers (e.g., an antibiotic resistance gene). Exemplary plasmid vectors for transformation of E. coli cells, include, for example, the pQE expression vectors (available from Qiagen, Valencia, Calif.; see also literature published by Qiagen describing the system). pQE vectors have a phage T5 promoter (recognized by E. coli RNA polymerase) and a double lac operator repression module to provide tightly regulated, high-level expression of recombinant proteins in E. coli, a synthetic ribosomal binding site (RBS II) for efficient translation, a 6×His tag coding sequence, to and T1 transcriptional terminators, ColE1 origin of replication, and a beta-lactamase gene for conferring ampicillin resistance. The pQE vectors enable placement of a 6×His tag at either the N- or C-terminus of the recombinant protein.

[0641] Such plasmids include pQE 32, pQE 30, and pQE 31 which provide multiple cloning sites for all three reading frames and provide for the expression of N-terminally 6×His-tagged proteins. Other exemplary plasmid vectors for transformation of E. coli cells, include, for example, the pET expression vectors (see, U.S. Pat. No. 4,952,496; available from Novagen, Madison, Wis.; see, also literature published by Novagen describing the system). Such plasmids include pET 11α, which contains the T7lac promoter, T7 terminator, the inducible E. coli lac operator, and the lac repressor gene; pET 12a-c, which contains the T7 promoter, T7 terminator, and the E. coli ompT secretion signal; and pET 15b and pET19b (Novagen, Madison, Wis.), which contain a His-Tag™ leader sequence for use in purification with a His column and a thrombin cleavage site that permits cleavage following purification over the column, the T7-lac promoter region and the T7 terminator.

[0642] Exemplary of a vector for mammalian cell expression is the HZ24 expression vector. The HZ24 expression vector was derived from the pCI vector backbone (Promega). It contains DNA encoding the Beta-lactamase resistance gene (AmpR), an F1 origin of replication, a Cytomegalovirus immediate-early enhancer/promoter region (CMV), and an SV40 late polyadenylation signal (SV40). The expression vector also has an internal ribosome entry site (IRES) from the ECMV virus (Clontech) and the mouse dihydrofolate reductase (DHFR) gene.

[0643] 2. Expression

[0644] Hyaluronan degrading enzyme polypeptides, including soluble hyaluronidase polypeptides, can be produced by any method known to those of skill in the art including in vivo and in vitro methods. Desired proteins can be expressed in any organism suitable to produce the required amounts and forms of the proteins, such as for example, needed for administration and treatment. Expression hosts include prokaryotic and eukaryotic organisms such as E. coli, yeast, plants, insect cells, mammalian cells, including human cell lines and transgenic animals. Expression hosts can differ in their protein production levels as well as the types of post-translational modifications that are present on the expressed proteins. The choice of expression host can be made based on these and other factors, such as regulatory and safety considerations, production costs and the need and methods for purification.

[0645] Many expression vectors are available and known to those of skill in the art and can be used for expression of proteins. The choice of expression vector will be influenced by the choice of host expression system. In general, expression vectors can include transcriptional promoters and optionally enhancers, translational signals, and transcriptional and translational termination signals. Expression vectors that are used for stable transformation typically have a selectable marker which allows selection and maintenance of the transformed cells. In some cases, an origin of replication can be used to amplify the copy number of the vector.

[0646] Hyaluronan degrading enzyme polypeptides, such as soluble hyaluronidase polypeptides, also can be utilized or expressed as protein fusions. For example, an enzyme fusion can be generated to add additional functionality to an enzyme. Examples of enzyme fusion proteins include, but are not limited to, fusions of a signal sequence, a tag such as for localization, e.g. a his6 tag or a myc tag, or a tag for purification, for example, a GST fusion, and a sequence for directing protein secretion and/or membrane association.

[0647] a. Prokaryotic Cells

[0648] Prokaryotes, especially E. coli, provide a system for producing large amounts of proteins. Transformation of E. coli is a simple and rapid technique well known to those of skill in the art. Expression vectors for E. coli can contain inducible promoters, such promoters are useful for inducing high levels of protein expression and for expressing proteins that exhibit some toxicity to the host cells. Examples of inducible promoters include the lac promoter, the trp promoter, the hybrid tac promoter, the T7 and SP6 RNA promoters and the temperature regulated λPL promoter.

[0649] Proteins, such as any provided herein, can be expressed in the cytoplasmic environment of E. coli. The cytoplasm is a reducing environment and for some molecules, this can result in the formation of insoluble inclusion bodies. Reducing agents such as dithiothreitol and β-mercaptoethanol and denaturants, such as guanidine-HCl and urea can be used to resolubilize the proteins. An alternative approach is the expression of proteins in the periplasmic space of bacteria which provides an oxidizing environment and chaperonin-like and disulfide isomerases and can lead to the production of soluble protein. Typically, a leader sequence is fused to the protein to be expressed which directs the protein to the periplasm. The leader is then removed by signal peptidases inside the periplasm. Examples of periplasmic-targeting leader sequences include the pelB leader from the pectate lyase gene and the leader derived from the alkaline phosphatase gene. In some cases, periplasmic expression allows leakage of the expressed protein into the culture medium. The secretion of proteins allows quick and simple purification from the culture supernatant. Proteins that are not secreted can be obtained from the periplasm by osmotic lysis. Similar to cytoplasmic expression, in some cases proteins can become insoluble and denaturants and reducing agents can be used to facilitate solubilization and refolding. Temperature of induction and growth also can influence expression levels and solubility, typically temperatures between 25° C. and 37° C. are used. Typically, bacteria produce aglycosylated proteins. Thus, if proteins require glycosylation for function, glycosylation can be added in vitro after purification from host cells.

[0650] b. Yeast Cells

[0651] Yeasts such as Saccharomyces cerevisae, Schizosaccharomyces pombe, Yarrowia lipolytica, Kluyveromyces lactis and Pichia pastoris are well known yeast expression hosts that can be used for production of proteins, such as any described herein. Yeast can be transformed with episomal replicating vectors or by stable chromosomal integration by homologous recombination. Typically, inducible promoters are used to regulate gene expression. Examples of such promoters include GAL1, GAL7 and GALS and metallothionein promoters, such as CUP1, AOX1 or other Pichia or other yeast promoter. Expression vectors often include a selectable marker such as LEU2, TRP1, HIS3 and URA3 for selection and maintenance of the transformed DNA. Proteins expressed in yeast are often soluble. Co-expression with chaperonins such as Bip and protein disulfide isomerase can improve expression levels and solubility. Additionally, proteins expressed in yeast can be directed for secretion using secretion signal peptide fusions such as the yeast mating type alpha-factor secretion signal from Saccharomyces cerevisae and fusions with yeast cell surface proteins such as the Aga2p mating adhesion receptor or the Arxula adeninivorans glucoamylase. A protease cleavage site such as for the Kex-2 protease, can be engineered to remove the fused sequences from the expressed polypeptides as they exit the secretion pathway. Yeast also is capable of glycosylation at Asn-X-Ser/Thr motifs.

[0652] c. Insect Cells

[0653] Insect cells, particularly using baculovirus expression, are useful for expressing polypeptides such as hyaluronidase polypeptides. Insect cells express high levels of protein and are capable of most of the post-translational modifications used by higher eukaryotes. Baculovirus have a restrictive host range which improves the safety and reduces regulatory concerns of eukaryotic expression. Typical expression vectors use a promoter for high level expression such as the polyhedrin promoter of baculovirus. Commonly used baculovirus systems include the baculoviruses such as Autographa californica nuclear polyhedrosis virus (AcNPV), and the Bombyx mori nuclear polyhedrosis virus (BmNPV) and an insect cell line such as Sf9 derived from Spodoptera frupperda, Pseudaletia unipuncta (A7S) and Danaus plexippus (DpN1). For high-level expression, the nucleotide sequence of the molecule to be expressed is fused immediately downstream of the polyhedrin initiation codon of the virus. Mammalian secretion signals are accurately processed in insect cells and can be used to secrete the expressed protein into the culture medium. In addition, the cell lines Pseudaletia unipuncta (A7S) and Danaus plexippus (DpN1) produce proteins with glycosylation patterns similar to mammalian cell systems.

[0654] An alternative expression system in insect cells is the use of stably transformed cells. Cell lines such as the Schneider 2 (S2) and Kc cells (Drosophila melanogaster) and C7 cells (Aedes albopictus) can be used for expression. The Drosophila metallothionein promoter can be used to induce high levels of expression in the presence of heavy metal induction with cadmium or copper. Expression vectors are typically maintained by the use of selectable markers such as neomycin and hygromycin.

[0655] d. Mammalian Cells

[0656] Mammalian expression systems can be used to express proteins including hyaluronan degrading enzyme polypeptides, such as soluble hyaluronidase polypeptides. Expression constructs can be transferred to mammalian cells by viral infection such as adenovirus or by direct DNA transfer such as liposomes, calcium phosphate, DEAE-dextran and by physical means such as electroporation and microinjection. Expression vectors for mammalian cells typically include an mRNA cap site, a TATA box, a translational initiation sequence (Kozak consensus sequence) and polyadenylation elements. IRES elements also can be added to permit bicistronic expression with another gene, such as a selectable marker. Such vectors often include transcriptional promoter-enhancers for high-level expression, for example the SV40 promoter-enhancer, the human cytomegalovirus (CMV) promoter and the long terminal repeat of Rous sarcoma virus (RSV). These promoter-enhancers are active in many cell types. Tissue and cell-type promoters and enhancer regions also can be used for expression. Exemplary promoter/enhancer regions include, but are not limited to, those from genes such as elastase I, insulin, immunoglobulin, mouse mammary tumor virus, albumin, alpha fetoprotein, alpha 1 antitrypsin, beta globin, myelin basic protein, myosin light chain 2, and gonadotropic releasing hormone gene control. Selectable markers can be used to select for and maintain cells with the expression construct. Examples of selectable marker genes include, but are not limited to, hygromycin B phosphotransferase, adenosine deaminase, xanthine-guanine phosphoribosyl transferase, aminoglycoside phosphotransferase, dihydrofolate reductase (DHFR) and thymidine kinase. For example, expression can be performed in the presence of methotrexate to select for only those cells expressing the DHFR gene. Fusion with cell surface signaling molecules such as TCR-ζ and Fc_{ε}RI-γ can direct expression of the proteins in an active state on the cell surface.

[0657] Many cell lines are available for mammalian expression including mouse, rat human, monkey, chicken and hamster cells. Exemplary cell lines include but are not limited to CHO, Balb/3T3, HeLa, MT2, mouse NSO (nonsecreting) and other myeloma cell lines, hybridoma and heterohybridoma cell lines, lymphocytes, fibroblasts, Sp2/0, COS, NIH3T3, HEK293, 293S, 2B8, and HKB cells. Cell lines also are available adapted to serum-free media which facilitates purification of secreted proteins from the cell culture media. Examples include CHO—S cells (Invitrogen, Carlsbad, Calif., cat #11619-012) and the serum free EBNA-1 cell line (Pham et al., (2003) Biotechnol. Bioeng. 84:332-342). Cell lines also are available that are adapted to grow in special media optimized for maximal expression. For example, DG44 CHO cells are adapted to grow in suspension culture in a chemically defined, animal product-free medium.

[0658] e. Plants

[0659] Transgenic plant cells and plants can be used to express proteins such as any described herein. Expression constructs are typically transferred to plants using direct DNA transfer such as microprojectile bombardment and PEG-mediated transfer into protoplasts, and with agrobacterium-mediated transformation. Expression vectors can include promoter and enhancer sequences, transcriptional termination elements and translational control elements. Expression vectors and transformation techniques are usually divided between dicot hosts, such as Arabidopsis and tobacco, and monocot hosts, such as corn and rice. Examples of plant promoters used for expression include the cauliflower mosaic virus promoter, the nopaline synthetase promoter, the ribose bisphosphate carboxylase promoter and the ubiquitin and UBQ3 promoters. Selectable markers such as hygromycin, phosphomannose isomerase and neomycin phosphotransferase are often used to facilitate selection and maintenance of transformed cells. Transformed plant cells can be maintained in culture as cells, aggregates (callus tissue) or regenerated into whole plants. Transgenic plant cells also can include algae engineered to produce hyaluronidase polypeptides. Because plants have different glycosylation patterns than mammalian cells, this can influence the choice of protein produced in these hosts.

[0660] 3. Purification Techniques

[0661] Method for purification of polypeptides, including hyaluronan degrading enzyme polypeptides (e.g. soluble hyaluronidase polypeptides) or other proteins, from host cells will depend on the chosen host cells and expression systems. For secreted molecules, proteins are generally purified from the culture media after removing the cells. For intracellular expression, cells can be lysed and the proteins purified from the extract. When transgenic organisms such as transgenic plants and animals are used for expression, tissues or organs can be used as starting material to make a lysed cell extract. Additionally, transgenic animal production can include the production of polypeptides in milk or eggs, which can be collected, and if necessary, the proteins can be extracted and further purified using standard methods in the art.

[0662] Proteins, such as soluble hyaluronidase polypeptides, can be purified using standard protein purification techniques known in the art including but not limited to, SDS-PAGE, size fraction and size exclusion chromatography, ammonium sulfate precipitation and ionic exchange chromatography, such as anion exchange chromatography. Affinity purification techniques also can be utilized to improve the efficiency and purity of the preparations. For example, antibodies, receptors and other molecules that bind hyaluronidase enzymes can be used in affinity purification. Expression constructs also can be engineered to add an affinity tag to a protein such as a myc epitope, GST fusion or His6 and affinity purified with myc antibody, glutathione resin and Ni-resin, respectively. Purity can be assessed by any method known in the art including gel electrophoresis and staining and spectrophotometric techniques. Purified rHuPH20 compositions, as provided herein, typically have a specific activity of at least 70,000 to 100,000 Units/mg, for example, about 120,000 Units/mg. The specific activity can vary upon modification, such as with a polymer.

[0663] 4. PEGylation of Hyaluronan Degrading Enzyme Polypeptides

[0664] Polyethylene glycol (PEG) has been widely used in biomaterials, biotechnology and medicine primarily because PEG is a biocompatible, nontoxic, water-soluble polymer that is typically nonimmunogenic (Zhao and Harris, ACS Symposium Series 680: 458-72, 1997). In the area of drug delivery, PEG derivatives have been widely used in covalent attachment (i.e., “PEGylation”) to proteins to reduce immunogenicity, proteolysis and kidney clearance and to enhance solubility (Zalipsky, Adv. Drug Del. Rev. 16:157-82, 1995). Similarly, PEG has been attached to low molecular weight, relatively hydrophobic drugs to enhance solubility, reduce toxicity and alter biodistribution. Typically, PEGylated drugs are injected as solutions.

[0665] A closely related application is synthesis of crosslinked degradable PEG networks or formulations for use in drug delivery since much of the same chemistry used in design of degradable, soluble drug carriers can also be used in design of degradable gels (Sawhney et al., Macromolecules 26: 581-87, 1993). It also is known that intermacromolecular complexes can be formed by mixing solutions of two complementary polymers. Such complexes are generally stabilized by electrostatic interactions (polyanion-polycation) and/or hydrogen bonds (polyacid-polybase) between the polymers involved, and/or by hydrophobic interactions between the polymers in an aqueous surrounding (Krupers et al., Eur. Polym J. 32:785-790, 1996). For example, mixing solutions of polyacrylic acid (PAAc) and polyethylene oxide (PEO) under the proper conditions results in the formation of complexes based mostly on hydrogen bonding. Dissociation of these complexes at physiologic conditions has been used for delivery of free drugs (i.e., non-PEGylated). In addition, complexes of complementary polymers have been formed from both homopolymers and copolymers.

[0666] Numerous reagents for PEGylation have been described in the art. Such reagents include, but are not limited to, N-hydroxysuccinimidyl (NETS) activated PEG, succinimidyl mPEG, mPEG₂-N-hydroxysuccinimide, mPEG succinimidyl alpha-methylbutanoate, mPEG succinimidyl propionate, mPEG succinimidyl butanoate, mPEG carboxymethyl 3-hydroxybutanoic acid succinimidyl ester, homobifunctional PEG-succinimidyl propionate, homobifunctional PEG propionaldehyde, homobifunctional PEG butyraldehyde, PEG maleimide, PEG hydrazide, p-nitrophenyl-carbonate PEG, mPEG-benzotriazole carbonate, propionaldehyde PEG, mPEG butryaldehyde, branched mPEG2 butyraldehyde, mPEG acetyl, mPEG piperidone, mPEG methylketone, mPEG “linkerless” maleimide, mPEG vinyl sulfone, mPEG thiol, mPEG orthopyridylthioester, mPEG orthopyridyl disulfide, Fmoc-PEG-NHS, Boc-PEG-NHS, vinylsulfone PEG-NHS, acrylate PEG-NHS, fluorescein PEG-NHS, and biotin PEG-NHS (see e.g., Monfardini et al., Bioconjugate Chem. 6:62-69, 1995; Veronese et al., J. Bioactive Compatible Polymers 12:197-207, 1997; U.S. Pat. Nos. 5,672,662; 5,932,462; U.S. 6,495,659; U.S. Pat. Nos. 6,737,505; 4,002,531; 4,179,337; 5,122,614; 5,324,844; 5,446,090; 5,612,460; 5,643,575; 5,766,581; 5,795,569; 5,808,096; 5,900,461; 5,919,455; 5,985,263; 5,990,237; 6,113,906; 6,214,966; 6,258,351; 6,340,742; 6,413,507; 6,420,339; 6,437,025; 6,448,369; 6,461,802; U.S. 6,828,401; U.S. Pat. No. 6,858,736; U.S. Patent Publication Nos. U.S. 2001/0021763; U.S. 2001/0044526; U.S. 2001/0046481; U.S. 2002/0052430; U.S. 2002/0072573; U.S. 2002/0156047; U.S. 2003/0114647; U.S. 2003/0143596; U.S. 2003/0158333; U.S. 2003/0220447; U.S. 2004/0013637; US 2004/0235734; U.S. 2005/0114037; U.S. 2005/0171328; U.S. 2005/0209416; European Patent Nos. EP 1064951; EP 0822199; and International Patent Publication Nos. WO0500360; WO 01076640; WO 0002017; WO 0249673; WO 9428024; and WO 0187925).

[0667] In one example, the polyethylene glycol has a molecular weight ranging from about 3 kD to about 50 kD, and typically from about 5 kD to about 30 kD. Covalent attachment of the PEG to the drug (known as “PEGylation”) can be accomplished by known chemical synthesis techniques. For example, the PEGylation of protein can be accomplished by reacting NHS-activated PEG with the protein under suitable reaction conditions.

[0668] While numerous reactions have been described for PEGylation, those that are most generally applicable confer directionality, utilize mild reaction conditions, and do not necessitate extensive downstream processing to remove toxic catalysts or bi-products. For instance, monomethoxy PEG (mPEG) has only one reactive terminal hydroxyl, and thus its use limits some of the heterogeneity of the resulting PEG-protein product mixture. Activation of the hydroxyl group at the end of the polymer opposite to the terminal methoxy group is generally necessary to accomplish efficient protein PEGylation, with the aim being to make the derivatised PEG more susceptible to nucleophilic attack. The attacking nucleophile is usually the epsilon-amino group of a lysyl residue, but other amines also can react (e.g. the N-terminal alpha-amine or the ring amines of histidine) if local conditions are favorable. A more directed attachment is possible in proteins containing a single lysine or cysteine. The latter residue can be targeted by PEG-maleimide for thiol-specific modification. Alternatively, PEG hydrazide can be reacted with a periodate oxidized hyaluronan degrading enzyme and reduced in the presence of NaCNBH₃. More specifically, PEGylated CMP sugars can be reacted with a hyaluronan degrading enzyme in the presence of appropriate glycosyl-transferases. One technique is the “PEGylation” technique where a number of polymeric molecules are coupled to the polypeptide in question. When using this technique the immune system has difficulties in recognizing the epitopes on the polypeptide's surface responsible for the formation of antibodies, thereby reducing the immune response. For polypeptides introduced directly into the circulatory system of the human body to give a particular physiological effect (i.e. pharmaceuticals) the typical potential immune response is an IgG and/or IgM response, while polypeptides which are inhaled through the respiratory system (i.e. industrial polypeptide) potentially can cause an IgE response (i.e. allergic response). One of the theories explaining the reduced immune response is that the polymeric molecule(s) shield(s) epitope(s) on the surface of the polypeptide responsible for the immune response leading to antibody formation. Another theory or at least a partial factor is that the heavier the conjugate is, the more reduced immune response is obtained.

[0669] Typically, to make the PEGylated hyaluronan degrading enzymes provided herein, including the PEGylated hyaluronidases, PEG moieties are conjugated, via covalent attachment, to the polypeptides. Techniques for PEGylation include, but are not limited to, specialized linkers and coupling chemistries (see e.g., Roberts et al., Adv. Drug Deliv. Rev. 54:459-476, 2002), attachment of multiple PEG moieties to a single conjugation site (such as via use of branched PEGs; see e.g., Guiotto et al., Bioorg. Med. Chem. Lett. 12:177-180, 2002), site-specific PEGylation and/or mono-PEGylation (see e.g., Chapman et al., Nature Biotech. 17:780-783, 1999), and site-directed enzymatic PEGylation (see e.g., Sato, Adv. Drug Deliv. Rev., 54:487-504, 2002). Methods and techniques described in the art can produce proteins having 1, 2, 3, 4, 5, 6, 7, 8, 9, 10 or more than 10 PEG or PEG derivatives attached to a single protein molecule (see e.g., U.S. 2006/0104968).

[0670] As an exemplary illustration of the PEGylation of an illustrative method for making PEGylated hyaluronan degrading enzymes, such as PEGylated hyaluronidases, PEG aldehydes, succinimides and carbonates have each been applied to conjugate PEG moieties, typically succinimidyl PEGs, to rHuPH20. For example, rHuPH20 has been conjugated with exemplary succinimidyl monoPEG (mPEG) reagents including mPEG-Succinimidyl Propionates (mPEG-SPA), mPEG-Succinimidyl Butanoates (mPEG-SBA), and (for attaching “branched” PEGs) mPEG2-N-Hydroxylsuccinimide. These PEGylated succinimidyl esters contain different length carbon backbones between the PEG group and the activated cross-linker, and either a single or branched PEG group. These differences can be used, for example, to provide for different reaction kinetics and to potentially restrict sites available for PEG attachment to rHuPH20 during the conjugation process.

[0671] Succinimidyl PEGs (as above) comprising either linear or branched PEGs can be conjugated to rHuPH20. PEGs can used to generate rHuPH20s reproducibly containing molecules having, on the average, between about three to six or three to six PEG molecules per hyaluronidase. Such PEGylated rHuPH20 compositions can be readily purified to yield compositions having specific activities of approximately 25,000 or 30,000 Unit/mg protein hyaluronidase activity, and being substantially free of non-PEGylated rHuPH20 (less than 5% non-PEGylated).

[0672] Using various PEG reagents, exemplary versions of hyaluronan degrading enzymes, in particular soluble human recombinant hyaluronidases (e.g. rHuPH20), can be prepared, for example, using mPEG-SBA (30 kD), mPEG-SMB (30 kD), and branched versions based on mPEG2-NHS (40 kD) and mPEG2-NHS (60 kD). PEGylated versions of rHuPH20 have been generated using NHS chemistries, as well as carbonates, and aldehydes, using each of the following reagents: mPEG2-NHS-40K branched, mPEG-NHS-10K branched, mPEG-NHS-20K branched, mPEG2-NHS-60K branched; mPEG-SBA-5K, mPEG-SBA-20K, mPEG-SBA-30K; mPEG-SMB-20K, mPEG-SMB-30K; mPEG-butyraldehyde; mPEG-SPA-20K, mPEG-SPA-30K; and PEG-NHS-5K-biotin. PEGylated hyaluronidases have also been prepared using PEG reagents available from Dowpharma, a division of Dow Chemical Corporation; including hyaluronidases PEGylated with Dowpharma's p-nitrophenyl-carbonate PEG (30 kDa) and with propionaldehyde PEG (30 kDa).

[0673] In one example, the PEGylation includes conjugation of mPEG-SBA, for example, mPEG-SBA-30K (having a molecular weight of about 30 kDa) or another succinimidyl esters of PEG butanoic acid derivative, to a soluble hyaluronidase. Succinimidyl esters of PEG butanoic acid derivatives, such as mPEG-SBA-30K readily couple to amino groups of proteins. For example, covalent conjugation of m-PEG-SBA-30K and rHuPH20 (which is approximately 60 KDa in size) provides stable amide bonds between rHuPH20 and mPEG, as shown in Scheme 1, below.

[chemical structure]

[0674] Typically, the mPEG-SBA-30K or other PEG is added to the hyaluronan degrading enzyme, in some instances a hyaluronidase, at a PEG:polypeptide molar ratio of 10:1 in a suitable buffer, e.g. 130 mM NaCl/10 mM HEPES at pH 6.8 or 70 mM phosphate buffer, pH 7, followed by sterilization, e.g. sterile filtration, and continued conjugation, for example, with stirring, overnight at 4° C. in a cold room. In one example, the conjugated PEG-hyaluronan degrading enzyme is concentrated and buffer-exchanged.

[0675] Other methods of coupling succinimidyl esters of PEG butanoic acid derivatives, such as mPEG-SBA-30K are known in the art (see e.g., U.S. Pat. Nos. 5,672,662; 6,737,505; and U.S. 2004/0235734). For example, a polypeptide, such as a hyaluronan degrading enzyme (e.g. a hyaluronidase), can be coupled to an NHS activated PEG derivative by reaction in a borate buffer (0.1 M, pH 8.0) for one hour at 4° C. The resulting PEGylated protein can be purified by ultrafiltration. Alternatively, PEGylation of a bovine alkaline phosphatase can be accomplished by mixing the phosphatase with mPEG-SBA in a buffer containing 0.2 M sodium phosphate and 0.5 M NaCl (pH 7.5) at 4° C. for 30 minutes. Unreacted PEG can be removed by ultrafiltration. Another method reacts polypeptide with mPEG-SBA in deionized water to which triethylamine is added to raise the pH to 7.2-9. The resulting mixture is stirred at room temperature for several hours to complete the PEGylation.

[0676] Methods for PEGylation of hyaluronan degrading polypeptides, including, for example, animal-derived hyaluronidases and bacterial hyaluronan degrading enzymes, are known to one of skill in the art. See, for example, European Patent No. EP 0400472, which describes the PEGylation of bovine testes hyaluronidase and chondroitin ABC lyase. Also, U.S. Publication No. US2006/0104968 describes PEGylation of a human hyaluronidase derived from human PH20. For example, the PEGylated hyaluronan-degrading enzyme generally contains at least 3 PEG moieties per molecule. For example, the hyaluronan-degrading enzyme can have a PEG to protein molar ratio between 5:1 and 9:1, for example, 7:1. PEGylated hyaluronan degrading enzyme, such as PEGylated soluble human PH20 hyaluronidase, includes those produced so that there is on the average 1 PEG moiety or 2-6, or 3-6, or other number, as desired, per hyaluronan degrading enzyme, such as per soluble PH20 hyaluronidase.

### F. Combinations, Pharmaceutical Compositions and Formulations

[0677] 1. Combinations

[0678] Provided herein are combinations of a monoclonal antibody that binds to a biomarker for Type III collagen degradation, such as C3M, and an anti-hyaluronan agent or composition thereof. The combination can further contain a monoclonal antibody that binds to a biomarker for Type III collagen formation, such as Pro-C3. Any of these combinations can further include a tumor-targeted taxane formulation or composition; the formulation or compositions can be administered as a separate composition or formulation or in a single composition or formulation with the anti-hyaluronan agent. The taxane formulation can be co-formulated or co-administered with compositions containing an anti-hyaluronan agent, such as a hyaluronan-degrading enzyme. For example, such combinations can be used to select subjects for treatment with an anti-hyaluronan agent and then administer the treatment to subjects so identified. In some examples, the anti-hyaluronan agent, such as a hyaluronan-degrading enzyme, can be provided as a combination of separate compositions that are administered separately. In other examples, the anti-hyaluronan agent, e.g., hyaluronan-degrading enzyme, and taxane are provided in the same composition and can be administered together. The compositions or combination of compositions can be formulated for parenteral delivery (i.e. for systemic delivery). For example, the compositions or combination of compositions are formulated for subcutaneous delivery or for intravenous delivery.

[0679] Also provided herein are combinations and compositions containing a third agent that is a further chemotherapeutic agent for treating cancer, such as a nucleoside analog or other antimetabolite (e.g. gemcitabine or derivative or other nucleoside analog). Exemplary of such agents are described above and elsewhere herein. The further chemotherapeutic agent, for example a nucleoside analog, can be co-formulated or co-administered with compositions containing an anti-hyaluronan agent, such as a hyaluronan-degrading enzyme, and/or compositions containing a tumor-targeted taxane. For example, the further chemotherapeutic agent, for example a nucleoside analog, can be provided as a separate composition from the combinations or compositions of an anti-hyaluronan agent, e.g., hyaluronan-degrading enzyme, and taxane. In other examples, the nucleoside analog is co-formulated with one or both of the anti-hyaluronan agent, for example, the hyaluronan-degrading enzyme, and taxane. For example, the nucleoside analog is co-formulated with an anti-hyaluronan agent, such as a hyaluronan-degrading enzyme, and a tumor-targeted taxane is provided as a separate composition. In another example, the nucleoside analog is co-formulated with a tumor-targeted taxane and an anti-hyaluronan agent, for example, hyaluronan-degrading enzyme, is provided as a separate composition. As a further example, the nucleoside analog, anti-hyaluronan agent and tumor-targeted taxane are co-formulated together in the same composition. The compositions or combination of compositions can be formulated for parenteral delivery (i.e. for systemic delivery). For example, the compositions or combination of compositions are formulated for subcutaneous delivery or for intravenous delivery.

[0680] The compositions can be formulated for single dosage administration or for multiple dosage administration. The agents can be formulated for direct administration. The compositions can be provided as a liquid or lyophilized formulation.

[0681] The compounds can be formulated into suitable pharmaceutical preparations such as solutions, suspensions, tablets, dispersible tablets, pills, capsules, powders, sustained release formulations or elixirs, for oral administrate, as well as transdermal patch preparation and dry powder inhalers. Typically, the compounds are formulated into pharmaceutical compositions using techniques and procedures well known in the art (see e.g., Ansel Introduction to Pharmaceutical Dosage Forms, Fourth Edition, 1985, 126). Generally, the mode of formulation is a function of the route of administration. The compositions can be co-formulated or provided as separate compositions.

[0682] Generally, the compositions are formulated in lyophilized or liquid form. Where the compositions are provided in lyophilized form they can be reconstituted just prior to use by an appropriate buffer, for example, a sterile saline solution. The compositions can be provided together or separately. For purposes herein, such compositions typically are provided separately. The anti-hyaluronan agent, for example, the hyaluronan degrading enzyme, such as soluble hyaluronidase, tumor-targeted taxane and/or a further chemotherapeutic agent can be packaged as separate compositions for administration together, sequentially or intermittently.

[0683] The combinations can be packaged as a kit. In some embodiments, a kit can include (a) capture reagents (such as, for example, at least one antibody) for detecting biomarkers in a biological sample, wherein the biomarkers are C3M and Pro-C3, and (b) optionally one or more software or computer program products for classifying the individual from whom the biological sample was obtained as either a responder or a non-responder for treatment with an anti-hyaluronan agent. In an alternate embodiment, one or more instructions for manually performing the above steps by a human can be provided. The kit optionally can include instructions for using the devices and reagents, handling the sample, and analyzing the data. The kits provided herein also can be used with a computer system or software to analyze samples from subjects to be screened for selection to undergo treatment that includes administering an anti-hyaluronan agent.

[0684] The kits can also contain one or more reagents (e.g., solubilization buffers, detergents, washes, or buffers) for processing a sample. Any of the kits provided herein can also include, e.g., buffers, blocking agents, mass spectrometry matrix materials, antibody capture agents, positive control samples, negative control samples, reference standards, software and information such as protocols, guidance and reference data.

[0685] A kit can contain (a) at least one capture reagent for quantifying biomarkers in a test sample, wherein said biomarkers are C3M and Pro-C3, and optionally (b) one or more algorithms or computer programs for performing the steps of comparing the ratio of amount of C3M and Pro-C3 quantified in the test sample to one or more predetermined cutoffs and using said comparison to determine whether an individual would respond to PAG.

[0686] 2. Formulations

[0687] Compositions for the treatment of subjects selected for such treatment according to the methods provided herein can be formulated for administration by any route known to those of skill in the art including intramuscular, intravenous, intradermal, intralesional, intraperitoneal injection, subcutaneous, intratumoral, epidural, nasal, oral, vaginal, rectal, topical, local, otic, inhalational, buccal (e.g., sublingual), and transdermal administration or any route. Other modes of administration also are contemplated. Administration can be local, topical or systemic depending upon the locus of treatment. Local administration to an area in need of treatment can be achieved by, for example, but not limited to, local infusion during surgery, topical application, e.g., in conjunction with a wound dressing after surgery, by injection, by means of a catheter, by means of a suppository, or by means of an implant. Compositions also can be administered with other biologically active agents, either sequentially, intermittently or in the same composition. Administration also can include controlled release systems including controlled release formulations and device controlled release, such as by means of a pump.

[0688] The most suitable route in any given case depends on a variety of factors, such as the nature of the disease, the progress of the disease, the severity of the disease and the particular composition which is used. For purposes herein, it is desired that an anti-hyaluronan agent, typically a hyaluronan degrading enzyme, such as a soluble hyaluronidase, tumor-targeted taxane and/or further chemotherapeutic agent are administered such that a pharmaceutically available amount or level exists in the plasma. For example, compositions are administered sytemically, for example, via intravenous administration. Subutaneous methods also can be employed, although increased absorption times can be necessary to ensure equivalent bioavailability compared to intravenous methods. The agents, such as a hyaluronan degrading enzyme, tumor-targeted taxane, and/or a further chemotherapeutic agent (e.g. nucleoside analog) can be administered by different routes of administration. Pharmaceutical compositions can be formulated in dosage forms appropriate for each route of administration.

[0689] Administration methods can be employed to decrease the exposure of hyaluronan degrading enzymes, e.g. soluble hyaluronidases, and other molecules to degradative processes, such as proteolytic degradation and immunological intervention via antigenic and immunogenic responses. Examples of such methods include local administration at the site of treatment or continuous infusion of the anti-hyaluronic agent.

[0690] 3. Pharmaceutical Compositions

[0691] Pharmaceutically acceptable compositions are prepared in view of approvals for a regulatory agency or other agency and are prepared in accordance with generally recognized pharmacopeia for use in animals and in humans. Compositions can take the form of solutions, suspensions, emulsion, tablets, pills, capsules, powders, and sustained release formulations. A composition can be formulated as a suppository, with traditional binders and carriers such as triglycerides. Oral formulation can include standard carriers such as pharmaceutical grades of mannitol, lactose, starch, magnesium stearate, sodium saccharine, cellulose, magnesium carbonate, and other such agents. The formulation should suit the mode of administration.

[0692] Pharmaceutical compositions can include carriers such as a diluent, adjuvant, excipient, or vehicle with which an enzyme or activator is administered. Examples of suitable pharmaceutical carriers are described in “Remington's Pharmaceutical Sciences” by E. W. Martin. Such compositions will contain a therapeutically effective amount of the compound, generally in purified form, together with a suitable amount of carrier so as to provide the form for proper administration to the patient. Such pharmaceutical carriers can be sterile liquids, such as water and oils, including those of petroleum, animal, vegetable or synthetic origin, such as peanut oil, soybean oil, mineral oil, and sesame oil. Water is a typical carrier when the pharmaceutical composition is administered intravenously. Saline solutions and aqueous dextrose and glycerol solutions also can be employed as liquid carriers, particularly for injectable solutions. Compositions can contain along with an active ingredient: a diluent such as lactose, sucrose, dicalcium phosphate, or carboxymethylcellulose; a lubricant, such as magnesium stearate, calcium stearate and talc; and a binder such as starch, natural gums, such as gum acacia, gelatin, glucose, molasses, polvinylpyrrolidine, celluloses and derivatives thereof, povidone, crospovidones and other such binders known to those of skill in the art. Suitable pharmaceutical excipients include starch, glucose, lactose, sucrose, gelatin, malt, rice, flour, chalk, silica gel, sodium stearate, glycerol monostearate, talc, sodium chloride, dried skim milk, glycerol, propylene, glycol, water, and ethanol. A composition, if desired, also can contain minor amounts of wetting or emulsifying agents, or pH buffering agents, for example, acetate, sodium citrate, cyclodextrin derivatives, sorbitan monolaurate, triethanolamine sodium acetate, triethanolamine oleate, and other such agents.

[0693] In one example, pharmaceutical preparation can be in liquid form, for example, solutions, syrups or suspensions. Such liquid preparations can be prepared by conventional means with pharmaceutically acceptable additives such as suspending agents (e.g., sorbitol syrup, cellulose derivatives or hydrogenated edible fats); emulsifying agents (e.g., lecithin or acacia); non-aqueous vehicles (e.g., almond oil, oily esters, or fractionated vegetable oils); and preservatives (e.g., methyl or propyl-p-hydroxybenzoates or sorbic acid). In another example, pharmaceutical preparations can be presented in lyophilized form for reconstitution with water or other suitable vehicle before use.

[0694] Pharmaceutically and therapeutically active compounds and derivatives thereof are typically formulated and administered in unit dosage forms or multiple dosage forms. Each unit dose contains a predetermined quantity of therapeutically active compound sufficient to produce the desired therapeutic effect, in association with the required pharmaceutical carrier, vehicle or diluent. Unit dosage forms, include, but are not limited to, tablets, capsules, pills, powders, granules, sterile parenteral solutions or suspensions, and oral solutions or suspensions, and oil water emulsions containing suitable quantities of the compounds or pharmaceutically acceptable derivatives thereof. Unit dose forms can be contained in ampoules and syringes or individually packaged tablets or capsules. Unit dose forms can be administered in fractions or multiples thereof. A multiple dose form is a plurality of identical unit dosage forms packaged in a single container to be administered in segregated unit dose form. Examples of multiple dose forms include vials, bottles of tablets or capsules or bottles of pints or gallons. Hence, multiple dose form is a multiple of unit doses that are not segregated in packaging. Generally, dosage forms or compositions containing active ingredient in the range of 0.005% to 100% with the balance made up from non-toxic carrier can be prepared.

[0695] Pharmaceutical composition can be formulated in dosage forms appropriate for each route of administration.

[0696] a. Injectables, Solutions and Emulsions

[0697] Parenteral administration, generally characterized by injection, either subcutaneously, intramuscularly, intratumorally, intravenously or intradermally is contemplated herein. Injectables can be prepared in conventional forms, either as liquid solutions or suspensions, solid forms suitable for solution or suspension in liquid prior to injection, or as emulsions. Suitable excipients are, for example, water, saline, dextrose, glycerol or ethanol. In addition, if desired, the pharmaceutical compositions to be administered may also contain an activator in the form of a solvent such as pH buffering agents, metal ion salts, or other such buffers. The pharmaceutical compositions also may contain other minor amounts of non-toxic auxiliary substances such as wetting or emulsifying agents, pH buffering agents, stabilizers, solubility enhancers, and other such agents, such as for example, sodium acetate, sorbitan monolaurate, triethanolamine oleate and cyclodextrins. Implantation of a slow-release or sustained-release system, such that a constant level of dosage is maintained (see, e.g., U.S. Pat. No. 3,710,795) also is contemplated herein. The percentage of active compound contained in such parenteral compositions is highly dependent on the specific nature thereof, as well as the activity of the compound and the needs of the subject.

[0698] For example, a standard stabilized formulation of a polymer-conjugated hyaluronan-degrading enzyme, such as a polymer-conjugated soluble hyaluronidase as provided herein, is formulated with one or more of EDTA, NaCl, CaCl₂), histidine, lactose, albumin, Pluronic® F68, TWEEN® and/or other detergent or other similar agents. For example, compositions provided herein can contain one or more pH buffers (such as, for example, histidine, phosphate, or other buffers), or acidic buffer (such as acetate, citrate, pyruvate, Gly-HCl, succinate, lactate, maleate or other buffers), tonicity modifier (such as, for example, an amino acid, polyalcohol, NaCl, trehalose, other salts and/or sugars), stabilizer, chelating agent, such as ethylenediaminetetraacetic acid, ethylenediaminetetraacetate or calcium EDTA, oxygen scavenger, such as methionine, ascorbic acid/ascorbate, citric acid/citrate, or albumin, and/or a preservative, such as preservative containing an aromatic ring (e.g. phenol or cresol). Exemplary stabilizers that are useful for compositions containing a hyaluronan degrading enzyme include detergents, such as polysorbates and proteins such as human serum albumin. Exemplary concentrations of serum albumin that are useful in the compositions herein include 0.1 mg/mL to 1 mg/mL, such as at least or at least about or about or 0.1 mg/mL, 0.2 mg/mL, 0.3 mg/mL, 0.4 mg/mL, 0.5 mg/mL, 0.6 mg/mL, 0.7 mg/mL, 0.8 mg/mL, 0.9 mg/mL or 1 mg/mL, but can be more or less. Polysorbates also can be present in the compositions at, for example, concentrations of or about between 0.001% to 0.1%, such as at least about or at least or about or 0.001%, 0.002%, 0.003%, 0.004%, 0.005%, 0.006%, 00.007%, 0.008%, 0.009%, 0.01%, 0.02%, 0.03%, 0.04%, 0.05%, 0.06%, 0.07%, 0.08%, 0.09% or 0.1%. A metal chelating agent, such as calcium EDTA (CaEDTA), also can be present, such as for example, at concentrations of between approximately 0.02 mM to 20 mM, such as at least about or at least or about or 0.02 mM, 0.04 mM, 0.06 mM, 0.08 mM, 0.1 mM, 0.2 mM, 0.3 mM, 0.4 mM, 0.5 mM, 0.6 mM, 0.7 mM, 0.8 mM, 0.9 mM, 1 mM, 5 mM, 10 mM, 15 mM, 20 mM or more. The pH and the osmolarity of the compositions can be adjusted by one of skill in the art to optimize the conditions for the desired activity and stability of the composition. In some examples, the compositions provided herein have an osmolarity of between 100 mOsm/kg to 500 mOsm/kg, such as at least or at least about or at or about 100 mOsm/kg, 120 mOsm/kg, 140 mOsm/kg, 160 mOsm/kg, 180 mOsm/kg, 200 mOsm/kg, 220 mOsm/kg, 240 mOsm/kg, 260 mOsm/kg, 280 mOsm/kg, 300 mOsm/kg, 320 mOsm/kg, 340 mOsm/kg, 360 mOsm/kg, 380 mOsm/kg, 400 mOsm/kg, 420 mOsm/kg, 440 mOsm/kg, 460 mOsm/kg, 500 or more mOsm/kg, and a pH of between or between about 6 to 8, such as 6 to 7.4, for example at or about 6, 6.2, 6.4, 6.6, 6.8, 7, 7.2, 7.4, 7.6, 7.8 or 8.

[0699] Generally, NaCl is provided in formulations containing a hyaluronan-degrading enzyme herein, for example, in an amount that is or is about 100 mM to 150 mM or more. For example, an exemplary formulation can contain at or about 10 mM histidine and/or at or about 130 mM NaCl. Other formulations can contain in addition or alternatively lactose, for example, at or about 13 mg/ml. Additionally, an anti-bacterial or anti-fungal agent, including, but not limited to thiomersal, can be present in the formulation. Formulations can further contain Albumin, Pluronic® F68, TWEEN® and/or other detergent. The formulations are provided at a pH that is or is about 6.0 to 7.4, such as 6.0, 6.1, 6.2, 6.3, 6.4, 6.5, 6.6, 6.7, 6.8, 6.9, 7.0, 7.1, 7.2, 7.3 or 7.4, generally that is or is about pH 6.5. Concentrated formulations of a modified soluble hyaluronidase for use herein are generally diluted in a saline solution or other salt buffered solution prior to administration to maintain the appropriate salt concentration.

[0700] Injectables are designed for local and systemic administration. For purposes herein, local administration is desired for direct administration to the affected interstitium associated with accumulated or excess hyaluronan. Preparations for parenteral administration include sterile solutions ready for injection, sterile dry soluble products, such as lyophilized powders, ready to be combined with a solvent just prior to use, including hypodermic tablets, sterile suspensions ready for injection, sterile dry insoluble products ready to be combined with a vehicle just prior to use and sterile emulsions. The solutions may be either aqueous or nonaqueous. If administered intravenously, suitable carriers include physiological saline or phosphate buffered saline (PBS), and solutions containing thickening and solubilizing agents, such as glucose, polyethylene glycol, and polypropylene glycol and mixtures thereof.

[0701] Pharmaceutically acceptable carriers used in parenteral preparations include aqueous vehicles, nonaqueous vehicles, antimicrobial agents, isotonic agents, buffers, antioxidants, local anesthetics, suspending and dispersing agents, emulsifying agents, sequestering or chelating agents and other pharmaceutically acceptable substances. Examples of aqueous vehicles include Sodium Chloride Injection, Ringers Injection, Isotonic Dextrose Injection, Sterile Water Injection, Dextrose and Lactated Ringers Injection. Nonaqueous parenteral vehicles include fixed oils of vegetable origin, cottonseed oil, corn oil, sesame oil and peanut oil. Antimicrobial agents in bacteriostatic or fungistatic concentrations can be added to parenteral preparations packaged in multiple-dose containers, which include phenols or cresols, mercurials, benzyl alcohol, chlorobutanol, methyl and propyl p-hydroxybenzoic acid esters, thimerosal, benzalkonium chloride and benzethonium chloride. Isotonic agents include sodium chloride and dextrose. Buffers include phosphate and citrate. Antioxidants include sodium bisulfate. Local anesthetics include procaine hydrochloride. Suspending and dispersing agents include sodium carboxymethylcelluose, hydroxypropyl methylcellulose and polyvinylpyrrolidone. Emulsifying agents include Polysorbate 80 (TWEEN 80). A sequestering or chelating agent of metal ions includes EDTA. Pharmaceutical carriers also include ethyl alcohol, polyethylene glycol and propylene glycol for water miscible vehicles and sodium hydroxide, hydrochloric acid, citric acid or lactic acid for pH adjustment.

[0702] If administered intravenously, suitable carriers include physiological saline or phosphate buffered saline (PBS), and solutions containing thickening and solubilizing agents, such as glucose, polyethylene glycol, and polypropylene glycol and mixtures thereof.

[0703] The concentration of the pharmaceutically active compound is adjusted so that an injection provides an effective amount to produce the desired pharmacological effect. The exact dose depends on the age, weight and condition of the patient or animal as is known in the art. The unit-dose parenteral preparations are packaged in an ampoule, a vial or a syringe with a needle. The volume of liquid solution or reconstituted powder preparation, containing the pharmaceutically active compound, is a function of the disease to be treated and the particular article of manufacture chosen for package. All preparations for parenteral administration must be sterile, as is known and practiced in the art.

[0704] b. Lyophilized powders

[0705] Of interest herein are lyophilized powders, which can be reconstituted for administration as solutions, emulsions and other mixtures. They may also be reconstituted and formulated as solids or gels. The lyophilized powders can be prepared from any of the solutions described above.

[0706] The sterile, lyophilized powder is prepared by dissolving a compound of an anti-hyaluronan agent that is a hyaluronan-degrading enzyme, such as a soluble hyaluronidase, and/or second agent in a buffer solution. The buffer solution may contain an excipient which improves the stability or other pharmacological component of the powder or reconstituted solution, prepared from the powder. Subsequent sterile filtration of the solution followed by lyophilization under standard conditions known to those of skill in the art provides the desired formulation. Briefly, the lyophilized powder is prepared by dissolving an excipient, such as dextrose, sorbitol, fructose, corn syrup, xylitol, glycerin, glucose, sucrose or other suitable agent, in a suitable buffer, such as citrate, sodium or potassium phosphate or other such buffer known to those of skill in the art. Then, a selected enzyme is added to the resulting mixture, and stirred until it dissolves. The resulting mixture is sterile filtered or treated to remove particulates and to insure sterility, and apportioned into vials for lyophilization. Each vial will contain a single dosage (1 mg-1 g, generally 1-100 mg, such as 1-5 mg) or multiple dosages of the compound. The lyophilized powder can be stored under appropriate conditions, such as at about 4° C. to room temperature.

[0707] Reconstitution of this lyophilized powder with a buffer solution provides a formulation for use in parenteral administration. The precise amount depends upon the indication treated and selected compound. Such amount can be empirically determined.

[0708] c. Topical Administration

[0709] Topical mixtures are prepared as described for the local and systemic administration. The resulting mixture may be a solution, suspension, emulsions or the like and are formulated as creams, gels, ointments, emulsions, solutions, elixirs, lotions, suspensions, tinctures, pastes, foams, aerosols, irrigations, sprays, suppositories, bandages, dermal patches or any other formulations suitable for topical administration.

[0710] The compounds or pharmaceutically acceptable derivatives thereof may be formulated as aerosols for topical application, such as by inhalation (see, e.g., U.S. Pat. Nos. 4,044,126, 4,414,209, and 4,364,923, which describe aerosols for delivery of a steroid useful for treatment inflammatory diseases, particularly asthma). These formulations for administration to the respiratory tract can be in the form of an aerosol or solution for a nebulizer, or as a microfine powder for insufflation, alone or in combination with an inert carrier such as lactose. In such a case, the particles of the formulation will typically have diameters of less than 50 microns, preferably less than 10 microns.

[0711] The compounds may be formulated for local or topical application, such as for topical application to the skin and mucous membranes, such as in the eye, in the form of gels, creams, and lotions and for application to the eye or for intracisternal or intraspinal application. Topical administration is contemplated for transdermal delivery and also for administration to the eyes or mucosa, or for inhalation therapies. Nasal solutions of the active compound alone or in combination with other pharmaceutically acceptable excipients also can be administered.

[0712] Formulations suitable for transdermal administration are provided. They can be provided in any suitable format, such as discrete patches adapted to remain in intimate contact with the epidermis of the recipient for a prolonged period of time. Such patches contain the active compound in optionally buffered aqueous solution of, for example, 0.1 to 0.2 M concentration with respect to the active compound. Formulations suitable for transdermal administration also can be delivered by iontophoresis (see, e.g., Pharmaceutical Research 3(6), 318 (1986)) and typically take the form of an optionally buffered aqueous solution of the active compound.

[0713] d. Compositions for Other Routes of Administration

[0714] Depending upon the condition treated other routes of administration, such as topical application, transdermal patches, oral and rectal administration, also are contemplated herein. For example, pharmaceutical dosage forms for rectal administration are rectal suppositories, capsules and tablets for systemic effect. Rectal suppositories include solid bodies for insertion into the rectum which melt or soften at body temperature releasing one or more pharmacologically or therapeutically active ingredients. Pharmaceutically acceptable substances utilized in rectal suppositories are bases or vehicles and agents to raise the melting point. Examples of bases include cocoa butter (theobroma oil), glycerin-gelatin, carbowax (polyoxyethylene glycol) and appropriate mixtures of mono-, di- and triglycerides of fatty acids. Combinations of the various bases may be used. Agents to raise the melting point of suppositories include spermaceti and wax. Rectal suppositories may be prepared either by the compressed method or by molding. The typical weight of a rectal suppository is about 2 to 3 gm. Tablets and capsules for rectal administration are manufactured using the same pharmaceutically acceptable substance and by the same methods as for formulations for oral administration.

[0715] Formulations suitable for rectal administration can be provided as unit dose suppositories. These can be prepared by admixing the active compound with one or more conventional solid carriers, for example, cocoa butter, and then shaping the resulting mixture.

[0716] For oral administration, pharmaceutical compositions can take the form of, for example, tablets or capsules prepared by conventional means with pharmaceutically acceptable excipients such as binding agents (e.g., pregelatinized maize starch, polyvinyl pyrrolidone or hydroxypropyl methylcellulose); fillers (e.g., lactose, microcrystalline cellulose or calcium hydrogen phosphate); lubricants (e.g., magnesium stearate, talc or silica); disintegrants (e.g., potato starch or sodium starch glycolate); or wetting agents (e.g., sodium lauryl sulphate). The tablets can be coated by methods well-known in the art.

[0717] Formulations suitable for buccal (sublingual) administration include, for example, lozenges containing the active compound in a flavored base, usually sucrose and acacia or tragacanth; and pastilles containing the compound in an inert base such as gelatin and glycerin or sucrose and acacia.

[0718] Pharmaceutical compositions also can be administered by controlled release formulations and/or delivery devices (see, e.g., in U.S. Pat. Nos. 3,536,809; 3,598,123; 3,630,200; 3,845,770; 3,847,770; 3,916,899; 4,008,719; 4,687,660; 4,769,027; 5,059,595; 5,073,543; 5,120,548; 5,354,556; 5,591,767; 5,639,476; 5,674,533 and 5,733,566).

[0719] Various delivery systems are known and can be used to administer selected compositions, such as but not limited to, encapsulation in liposomes, microparticles, microcapsules, recombinant cells capable of expressing the compound, receptor mediated endocytosis, and delivery of nucleic acid molecules encoding a soluble hyaluronidase or other agent such as retrovirus delivery systems.

[0720] The soluble hyaluronidases can be polymer-modified (polymer conjugated) to extend serum-half life or confer resistance to endogenous proteases. Polymers include pegylation moieties, albumination, polypeptides that confer resistance to enogenous proteases, sialation moieties, dextran, Fc, and other such moieties. Alternatively, the soluble hyaluronidases can be administered as part of a delivery vehicle, such as a lipid formulation, a liposome, micelle, multivesicular liposome (MVL) and other such vehicles that increases the stability of a soluble hyaluronidase. Exemplary of such vehicles are those described in U.S. Pat. No. 9,333,244. The vehicle-associated hyaluonidase generally is a soluble hyaluronidase. It is not necessary to modify it with a polymer, since the lipid formulation or other vehicle stabilizes and/or increases the serum stability of the hyaluronidase.

[0721] Hence, in certain embodiments, liposomes and/or nanoparticles also can be employed with administration of compositions herein. Liposomes are formed from phospholipids that are dispersed in an aqueous medium and spontaneously form multilamellar concentric bilayer vesicles (also termed multilamellar vesicles (MLVs)). MLVs generally have diameters of from 25 nm to 4 μm. Sonication of MLVs results in the formation of small unilamellar vesicles (SUVs) with diameters in the range of 200 to 500 angstroms containing an aqueous solution in the core. See, e.g., U.S. Pat. No. 9,333,244.

[0722] Phospholipids can form a variety of structures other than liposomes when dispersed in water, depending on the molar ratio of lipid to water. At low ratios, the liposomes form. Physical characteristics of liposomes depend on pH, ionic strength and the presence of divalent cations. Liposomes can show low permeability to ionic and polar substances, but at elevated temperatures undergo a phase transition which markedly alters their permeability. The phase transition involves a change from a closely packed, ordered structure, known as the gel state, to a loosely packed, less-ordered structure, known as the fluid state. This occurs at a characteristic phase-transition temperature and results in an increase in permeability to ions, sugars and drugs.

[0723] Liposomes interact with cells via different mechanisms: endocytosis by phagocytic cells of the reticuloendothelial system such as macrophages and neutrophils; adsorption to the cell surface, either by nonspecific weak hydrophobic or electrostatic forces, or by specific interactions with cell-surface components; fusion with the plasma cell membrane by insertion of the lipid bilayer of the liposome into the plasma membrane, with simultaneous release of liposomal contents into the cytoplasm; and by transfer of liposomal lipids to cellular or subcellular membranes, or vice versa, without any association of the liposome contents. Varying the liposome formulation can alter which mechanism is operative, although more than one can operate at the same time. Nanocapsules can generally entrap compounds in a stable and reproducible way. To avoid side effects due to intracellular polymeric overloading, such ultrafine particles (sized around 0.1 μm) should be designed using polymers able to be degraded in vivo. Biodegradable polyalkyl-cyanoacrylate nanoparticles that meet these requirements are contemplated for use herein, and such particles can be easily made.

[0724] 4. Formulation Amounts

[0725] The compositions can be formulated for single dosage administration or for multiple dosage administration. The agents can be formulated for direct administration.

[0726] In the compositions or combinations of compositions provided herein wherein the anti-hyaluronan agent is a hyaluronan-degrading enzyme such as a polymer-conjugated hyaluronan-degrading enzyme, the polymer-conjugated hyaluronan-degrading enzyme is formulated in an amount for direct administration in a range between or about between 0.5 μg to 50 mg, such as 100 μg to 1 mg, 1 mg to 20 mg, 100 μg to 5 mg, 0.5 μg to 1450 μg, 1 μg to 1000 μg, 5 μg to 1250 μg, 10 μg to 750 μg, 50 μg to 500 μg, 0.5 μg to 500 μg or 500 μg to 1450 μg. For example, the polymer-conjugated hyaluronan-degrading enzyme is formulated in an amount for direct administration in a range between or about between 15 Units (U) or 150 Units (U) to 60,000 Units per dose, 300 U to 30,000 U, 500 U to 25,000 U, 500 U to 10,000 U, 150 U to 15,000 U, 150 U to 5000 U, 500 U to 1000 U, 5000 U to 45,000 U 10,000 U to 50,000 U or 20,000 U to 60,000 U, for example at least or about at least or about or 15 U, 50 U, 100 U, 200 U, 300 U; 400 U; 500 U; 600 U; 700 U; 800 U; 900 U; 1,000 U; 1250 U; 1500 U; 2000 U; 3000 U; 4000 U; 5,000 U; 6,000 U; 7,000 U; 8,000 U; 9,000 U; 10,000 U; 20,000 U; 30,000 U; 40,000 U; or 50,000 U. The polymer-conjugated hyaluronan-degrading enzyme can be provided as a stock solution at or about 50 U/mL to 15,000 U/mL, such as 10 U/mL to 500 U/mL, 1000 U/mL to 15,000 U/mL, 100 U/mL to 5,000 U/mL, 500 U/mL to 5,000 U/mL or 100 U/mL to 400 U/mL, for example at least or at least about or about or 50 U/mL, 100 U/mL, 150 U/mL, 200 U/mL, 400 U/mL, 500 U/mL, 1000 U/mL, 2000 Units/mL, 3000 U/mL, 4000 U/mL, 5000 U/mL, 6000 U/mL, 7000 U/mL, 8000 U/mL, 9000 U/mL, 10,000 U/mL, 11,000 U/mL, 12,000 U/mL, or 12,800 U/mL. The volume of the composition can be 0.5 mL to 1000 mL, such as 0.5 mL to 100 mL, 0.5 mL to 10 mL, 1 mL to 500 mL, 1 mL to 10 mL, such as at least or about at least or about or 0.5 mL, 1 mL, 2 mL, 3 mL, 4 mL, 5 mL, 6 mL, 7 mL, 8 mL, 9 mL, 10 mL, 15 mL, 20 mL, 30 mL, 40 mL, 50 mL or more. The composition is generally formulated so that the polymer-conjugated hyaluronan-degrading enzyme is not administered in volumes greater than about 50 mL, and typically is administered in a volume of 5-30 mL, generally in a volume that is not greater than about 10 mL. For larger volumes, the time of infusion can be adapted to facilitate delivery of the larger volume. For example, infusion time can be at least 1 minute, 5 minutes, 10 minutes, 20 minutes, 30 minutes, 40 minutes, 50 minutes, 1 hour or more.

[0727] In the compositions or combinations of compositions provided herein, the tumor-targeted taxane, such as an albumin-bound taxane, for example albumin-bound paclitaxel, is formulated in an amount for direct administration of the taxane in a range between or about between 10 mg to 1000 mg, such as 20 mg to 500 mg, 10 mg to 250 mg, 75 mg to 400 mg, 100 mg to 200 mg, 150 mg to 400 mg, 200 mg to 800 mg, 50 mg to 200 mg or 50 mg to 150 mg. The composition can be provided as a lyophilized form for later reconstitution or as a liquid formulation. For example, reconstitution of a liquid formulation can be with water or 0.9% sodium chloride or other physiological solution. When reconstituted or provided as a liquid formulation, the composition can be provided containing taxane in the tumor-targeted taxane formulation as a stock solution of between or about between 0.01 mg/mL to 100 mg/mL, such as 1 mg/mL to 50 mg/ml, 2.5 mg/mL to 25 mg/mL, 5 mg/mL to 15 mg/mL or 10 mg/mL to 100 mg/mL, for example at least or about at least 5 mg/mL. The volume of the composition can be 0.5 mL to 1000 mL, such as 0.5 mL to 100 mL, 0.5 mL to 10 mL, 1 mL to 500 mL, 1 mL to 10 mL, such as at least or about at least or about or 0.5 mL, 1 mL, 2 mL, 3 mL, 4 mL, 5 mL, 6 mL, 7 mL, 8 mL, 9 mL, 10 mL, 15 mL, 20 mL, 30 mL, 40 mL, 50 mL, 100 mL, 200 mL or more. The entire vial contents can be withdrawn for administration, or can be divided up into a plurality of dosages for multiple administration. For larger volumes, the time of infusion can be adapted to facilitate delivery of the larger volume. For example, infusion time can be at least 1 minute, 5 minutes, 10 minutes, 20 minutes, 30 minutes, 40 minutes, 50 minutes, 1 hour or more. It is understood that formulations of a taxane can contain other components, including carriers, polymers, lipids and other excipients. The dosages provided above are with respect to the taxane component, which is the active ingredient.

[0728] For example, Abraxane®, an albumin-bound paclitaxel, is formulated as a solvent-free formulation of paclitaxel in which paclitaxel is complexed only with albumin to form stable particles of about 130 nm in size. Each 50 mL vial of Abraxane® contains 100 mg of paclitaxel and approximately 900 mg of human albumin as a sterile, lyophilized cake. Each vial is provided to be reconstituted with 20 mL of 0.9% Sodium Chloride Injection, USP to produce a suspension containing 5 mg/mL of paclitaxel. Reconstituted Abraxane suspension is infused at a recommended dose of 260 mg/m² intravenously over 30 minutes.

[0729] In the compositions or combinations of compositions provided herein, the nucleoside analog, such as gemcitabine or a derivative thereof, is formulated in an amount for direct administration in a range between or about between 100 mg to 5000 mg, such as 500 mg to 5000 mg, 500 mg to 2500 mg, 1000 mg to 2500 mg, 2000 mg to 5000 mg or 1500 mg to 2500 mg, generally at least or about at least or about 100 mg, 200 mg, 300 mg, 400 mg, 500 mg, 600 mg, 700 mg, 800 mg, 900 mg or 1000 mg. The composition can be provided as a lyophilized form for later reconstitution or as a liquid formulation. For example, reconstitution of a liquid formulation can be with water or 0.9% sodium chloride or other physiological solution. When reconstituted or provided as a liquid formulation, the composition can be provided as a stock solution containing a nucleoside analog of between or about between 1 mg/mL to 500 mg/mL, such as 5 mg/mL to 100 mg/ml, 10 mg/mL to 50 mg/mL, 25 mg/mL to 200 mg/mL or 20 mg/mL to 100 mg/mL, for example at least or about at least 5 mg/mL, 10 mg/mL, 20 mg/mL, 30 mg/mL or 40 mg/mL, and generally not greater than 40 mg/mL in order to minimize incomplete dissolution. The volume of the composition can be 0.5 mL to 1000 mL, such as 0.5 mL to 100 mL, 0.5 mL to 10 mL, 1 mL to 500 mL, 1 mL to 10 mL, such as at least or about at least or about or 0.5 mL, 1 mL, 2 mL, 3 mL, 4 mL, 5 mL, 6 mL, 7 mL, 8 mL, 9 mL, 10 mL, 15 mL, 20 mL, 30 mL, 40 mL, 50 mL, 100 mL, 200 mL or more. The entire vial contents can be withdrawn for administration, or can be divided up into a plurality of dosages for mutliple administration. For larger volumes, the time of infusion can be adapted to facilitate delivery of the larger volume. For example, infusion time can be at least 1 minute, 5 minutes, 10 minutes, 20 minutes, 30 minutes, 40 minutes, 50 minutes, 1 hour or more. Upon withdrawal of an amount of drug for administration, the formulation can be further diluted if desired, such as diluted in water, saline (e.g. 0.9%) or other physiological solution. It is understood that formulations of a nucleoside analog (e.g. gemcitabine or a derivative) can contain other components, including carriers, polymers, lipids and other excipients. The dosages provided above are with respect to the nucleoside analog component, which is the active ingredient.

[0730] For example, Gemzar®, gemictabine for injection, is provided as a lyophilized formulation containing 200 mg or 1000 mg active agent per vial. Each vial is provided to be reconstituted with 5 mL or 25 mL, respectively, of 0.9% Sodium Chloride Injection, USP to produce a suspension containing 40 mg/mL of gemcitabine (accounting for the displacement volume of the lyophilized powder the reconstituted concentration can be about or 38 mg/mL). Prior to administration, the appropriate amount of drug can be further diluted with 0.9% sodium chloride or other physiological solution.

[0731] 5. Packaging and Articles of Manufacture

[0732] Also provided are articles of manufacture containing packaging materials, any pharmaceutical composition or combination provided herein, and a label that indicates that the compositions and combinations are to be used for treatment of cancers, such as stromal tumor cancers or solid tumor cancers. Exemplary of articles of manufacture are containers including single chamber and dual chamber containers. The containers include, but are not limited to, tubes, bottles and syringes. The containers can further include a needle for subcutaneous administration.

[0733] In one example, the article of manufacture contains a pharmaceutical composition containing the anti-hyaluronan agent, such as the polymer-conjugated hyaluronan-degrading enzyme, and tumor-targeted taxane and no further agent or treatment. In another example, the article of manufacture contains pharmaceutical compositions containing the anti-hyaluronan agent, e.g., polymer-conjugated hyaluronan-degrading enzyme, the tumor-targeted taxane and a further chemotherapeutic agent (e.g. nucleoside analog). In this example, the agents can be provided together or separately, for packaging as articles of manufacture.

[0734] The articles of manufacture provided herein contain packaging materials. Packaging materials for use in packaging pharmaceutical products are well known to those of skill in the art. See, for example, U.S. Pat. Nos. 5,323,907, 5,052,558 and 5,033,252, each of which is incorporated herein in its entirety. Examples of pharmaceutical packaging materials include, but are not limited to, blister packs, bottles, tubes, inhalers, pumps, bags, vials, containers, syringes, bottles, and any packaging material suitable for a selected formulation and intended mode of administration and treatment.

[0735] The choice of package depends on the agents, and whether such compositions will be packaged together or separately. In general, the packaging is non-reactive with the compositions contained therein. In other examples, some of the components can be packaged as a mixture. In other examples, all components are packaged separately. Thus, for example, the components can be packaged as separate compositions that, upon mixing just prior to administration, can be directly administered together. Alternatively, the components can be packaged as separate compositions for administration separately.

[0736] The components can be packaged in a container. The components are separately packaged in the same container. Generally, examples of such containers include those that have an enclosed, defined space that contains the polymer-conjugated hyaluronan-degrading enzyme, and a separate enclosed, defined space containing the other components or component such that the subsequent areas are separated by a readily removable membrane which, upon removal, permits the components to mix, or which permits the components to be separately administered. Any container or other article of manufacture is contemplated, so long as the agents are separated from the other components prior to administration. For suitable embodiments see e.g., containers described in U.S. Pat. Nos. 3,539,794 and 5,171,081.

[0737] Selected compositions including articles of manufacture thereof also can be provided as kits. Kits can include a pharmaceutical composition described herein and an item for administration provided as an article of manufacture. The kit can, optionally, include instructions for application including dosages, dosing regimens and instructions for modes of administration. Kits also can include a pharmaceutical composition described herein and an item for diagnosis.

### G. Methods of Assessing Activity, Bioavailability and Pharmacokinetics

[0738] The agents in the compositions herein can be assessed for properties and activities. The properties and activities can be related to biological activities and/or tumorgenic activities. The assays can be performed in vitro or in vivo. Such assays can include, but are not limited to, measuring amounts of hyaluronan in tissue or tumor biopsies or soluble hyaluronan in plasma, measurements of hyaluronan catabolites in blood or urine, measurements of hyaluronidase activity in plasma, or measurements of interstitial fluid pressure, vascular volume or water content in tumors. The assays can be used to assess effects of agents, including effects of dose and route of administration.

[0739] 1. In Vitro Assays

[0740] a. Hyaluronidase Activity of a Hyaluronan Degrading Enzyme

[0741] The activity of a hyaluronan degrading enzyme can be assessed using methods well known in the art. For example, the USP XXII assay for hyaluronidase determines activity indirectly by measuring the amount of undegraded hyaluronic acid, or hyaluronan, (HA) substrate remaining after the enzyme is allowed to react with the HA for 30 min at 37° C. (USP XXII-NF XVII (1990) 644-645 United States Pharmacopeia Convention, Inc., Rockville, Md.). A Hyaluronidase Reference Standard (USP) or National Formulary (NF) Standard Hyaluronidase solution can be used in an assay to ascertain the activity, in units, of any hyaluronidase. In one example, activity is measured using a microturbididy assay. This is based on the formation of an insoluble precipitate when hyaluronic acid binds with serum albumin. The activity is measured by incubating hyaluronidase with sodium hyaluronate (hyaluronic acid) for a set period of time (e.g., 10 minutes) and then precipitating the undigested sodium hyaluronate with the addition of acidified serum albumin. The turbidity of the resulting sample is measured at 640 nm after an additional development period. The decrease in turbidity resulting from hyaluronidase activity on the sodium hyaluronate substrate is a measure of hyaluronidase enzymatic activity. In another example, hyaluronidase activity is measured using a microtiter assay in which residual biotinylated hyaluronic acid is measured following incubation with hyaluronidase (see e.g. Frost and Stern (1997) Anal. Biochem. 251:263-269, U.S. Pat. Pub. No. 20050260186). The free carboxyl groups on the glucuronic acid residues of hyaluronic acid are biotinylated, and the biotinylated hyaluronic acid substrate is covalently coupled to a microtiter plate. Following incubation with hyaluronidase, the residual biotinylated hyaluronic acid substrate is detected using an avidin-peroxidase reaction, and compared to that obtained following reaction with hyaluronidase standards of known activity. Other assays to measure hyaluronidase activity also are known in the art and can be used in the methods herein (see e.g. Delpech et al., (1995) Anal. Biochem. 229:35-41; Takahashi et al., (2003) Anal. Biochem. 322:257-263).

[0742] The ability of a hyaluronan degrading enzyme, such as a modified soluble hyaluronidase (eg PEGylated rHuPH20) to act as a spreading or diffusing agent also can be assessed. For example, trypan blue dye can be injected, such as subcutaneously or intradermally, with or without a hyaluronan degrading enzyme into the lateral skin on each side of nude mice. The dye area is then measured, such as with a microcaliper, to determine the ability of the hyaluronan degrading enzyme to act as a spreading agent (see e.g. U.S. Published Patent No. 2006/0104968). The effect of co-administration of a hyaluronan degrading enzyme, such as a hyaluronidase, with another agent, such as a chemotherapeutic, on the pharmacokinetic and pharmacodynamic properties of that agent also can be assessed in vivo using animal model and/or human subjects, such as in the setting of a clinical trial, as discussed above and demonstrated in Example 1, below. The functional activity of a hyaluronan degrading enzyme that is not a hyaluronidase can be compared to a hyaluronidase using any of these assays. This can be done to determine what a functionally equivalent amount of a hyaluronan degrading enzyme is. For example, the ability of a hyaluronan degrading enzyme to act as a spreading or diffusing agent can be assessed by injecting it (e.g. subcutaneously or intradermally) into the lateral skin of mice with trypan blue, and the amount required to achieve the same amount of diffusion as, for example, 100 units of a Hyaluronidase Reference Standard, can be determined. The amount of hyaluronan degrading enzyme required is, therefore, functionally equivalent to 100 hyaluronidase units. The hydraulic conductivity (K), such as in a tumor, before and after treatment with a modified hyaluronan degrading enzyme, such as a modified hyaluronidase, also can be measured to assess the activity of a modified hyaluronan degrading enzyme preparation.

[0743] The ability of a modified hyaluronan degrading enzyme, such as a modified hyaluronidase, including pegylated hyaluronidase, to affect any one or more of the markers associated with hyaluronan-associated diseases and disorders described above, or any other associated markers or phenotypes, can be assessed using any one or more of the assays described above. For example, the ability of a modified hyaluronan degrading enzyme, such as a modified hyaluronidase, to reduce hyaluronan levels or content, formation or size of halos, interstitial fluid pressure, water content and/or vascular volume can be assessed using any one or more of the assays above in vitro, ex vivo and/or in vivo. In one example, a modified hyaluronidase can be administered to a subject with a tumor or an appropriate animal model and the effect on hyaluronan levels, formation or size of halos, interstitial fluid pressure, water content and/or vascular volume assessed and compared to subjects or animal models not administered modified hyaluronidase. In some examples, the modified hyaluronidase can be administered with another agent, such as a chemotherapeutic agent.

[0744] Other assays to assess hyaluronidase activity, including effects on HA synthesis or degradation, are known to one of skill in the art, including but not limited to any described herein or known in the art, for example, in vitro assays that measure hyaluronan degradation (see e.g., Frost and Stern (1997) Anal. Biochem. 251:263-269), staining tissue or other samples for HA such as by using an HA-binding protein or other anti-HA reagent (see e.g., Nishida et al. (1999) J. Biol. Chem., 274:21893-21899), particle exclusion assay (Nishida et al. 1999; Morohashi et al. (2006) Biochem Biophys. Res. Comm., 345:1454-1459); measuring or assessing HAS mRNA expression for an has gene (Nishida et al. 1999).

[0745] b. Taxane Activity

[0746] Standard physiological, pharmacological and biochemical procedures are available for testing the compounds to identify those that possess a desired biological activity for inhibiting tubulin association. In vitro and in vivo assays can be used to evaluate biological activity, such as cytotoxicity and tubulin polymerization (see e.g., Hidaka et al. (2012) Biosci. Biotechnol. Biochem., 76:349-352).

[0747] For example, the taxane compounds provided herein can be tested in a microtubule stabilization assay (Barron et al., (2003) Anal. Biochem., 315:49-56). Tubulin assembly or inhibition thereof can be monitored in a tubulin polymerization assay in an absorbance or fluorescence format. For example, an optical density based tubulin polymerization assay can be used, since the concentration of a microtubule polymer is proportional to the extent of light that is scattered by microtubules. Exemplary of such an assay is the Tubulin polymerization HTS Assay (Catalog No. BK004P or BK006P; Cytoskeleton, Denver, Colo.). A fluorescence-based assay also can be used, whereby polymerization is followed by fluroescence enhancement due to the incorporation of a fluorescent reporter into microtubules (Catalog No. BK011P, Cytoskeleton, Denver). In such assays, tubulin can be incubated with a taxane compound, such as paclitaxel, vinblastine or doceletaxel, and polymerization can be measured over time. For example, in a fluroescence assay, polymerization can be measured by monitoring changes in fluorescence at excitation at 360 nm and emission at 420 nm. Tubulin assembly can also be monitored by light scattering, which is approximated by the apparent absorption at 350 nm. In the assay, bovine serum albumin (BSA) is generally employed to prevent aggregation. Also, glycerol, which is a tubulin polymerization enhancer, is omitted to increase the signal to noise ratio. As a control, the microtubule destabilizing drug, vinblastine, can be used, which stabilizes tubulin and does not effect depolymerization.

[0748] c. Anticancer Activity

[0749] Anticancer activity of the compounds and agents described herein, including hyaluronan-degrading enzyme, tumor-taxane targeted and/or other chemotherapeutic agent (e.g. nucleoside analog) and formulations thereof can be examined in vitro, for example, by incubating a cancer cell culture with the derivative, and then evaluating cell growth inhibition in the culture. Suitable cells for such testing include murine P388 leukemia, B16 melanoma and Lewis lung cancer cells, as well as human mammary MCF7, ovarian OVCAR-3, A549 lung cancer cells, MX-1 (human breast tumor cell), HT29 (colon cancer cell line), HepG2 (liver cancer cell lines), and HCT116 (colon cancer cell lines).

[0750] 2. In Vivo Animal Models

[0751] Animal models can be used to assess the effects of compositions or combinations provided herein on hyaluronan levels or content, interstitial fluid pressure, water content, vascular volume, and on tumor size, volume or growth. In addition, animal models can be used to assess the pharmacokinetics or tolerability of the compositions or combinations.

[0752] Animal models can include, but are not limited to, mice, rats, rabbits, dogs, guinea pigs and non-human primate models, such as cynomolgus monkeys or rhesus macaques. Animal models including genetic models as well as xenograft models. For example, xenograft models include those in which, prior to testing the agents, tumors can be established in suitable test animals, e.g., nude mice. In some examples, immunodeficient mice, such as nude mice or SCID mice, are transplanted with a tumor cell line, such as from a hyaluronan-associated cancer, to establish an animal model of that cancer. Exemplary cell lines, including from hyaluronan-associated cancers, include, but are not limited to, PC3 prostate carcinoma cells, BxPC-3 pancreatic adenocarcinoma cells, MDA-MB-231 breast carcinoma cells, MCF-7 breast tumor cells, BT474 breast tumor cells, Tramp C2 prostate tumor cells and Mat-LyLu prostate cancer cells, and other cell lines described herein that are hyaluronan associated, e.g. contain elevated levels of hyaluronan. Exemplary of an animal tumor model of pancreatic cancer involves the generation of tumors in animals using BxPC-3 pancreatic adenocarcinoma cells (see e.g. Von Hoff et al. (2011) J Clin. Oncol., 29:4548-54).

[0753] Genetic models also can be used in which animals are rendered to be deficient in one or more genes that results in tumor generation or formation. Such genetically engineered mouse models (GEMM) can recapitulate the molecular and clinical features of disease. For example, an exemplary pancreatic cancer genetic model involves the pancreatic specific expression of endogenous mutants Kras and Trp53 alleles, which results in mutant mice that exhibit a deficient phenotype (termed KPC mice; LSL-Kras^{G12D}, LSL-Trp53^{R172H}, Pdx-1-Cre). The KPC mice develop primary pancreatic tumors that exhibit features similar to human disease, including resistance to the nucleoside analog gemcitabine (see e.g. Frese et al. (2012) Cancer Discovery, 2:260-269).

[0754] The compositions or combinations provided herein can be administered to the mice to assess effects on the disease. For example, hyaluronan levels can be assessed or measured. In another example, the effects on tumor growth or tumor cell inhibition can be assessed. For example, ED₅₀ values, that is, the amount of the agent(s) required to achieve 50% inhibition of tumor growth in the animal can be determined. Survival rates also can be determined.

[0755] 3. Pharmacokinetics and Tolerability

[0756] Pharmacokinetic and tolerability studies can be performed using animal models or can be performed during clinical studies with patients to assess the effect of the combinations and compositions provided herein. Animal models include, but are not limited to, mice, rats, rabbits, dogs, guinea pigs and non-human primate models, such as cynomolgus monkeys or rhesus macaques. In some instances, pharmacokinetic and tolerability studies are performed using healthy animals. In other examples, the studies are performed using animal models of a disease for which therapy with a combination or composition herein is considered, such as animal models of cancer.

[0757] The pharmacokinetic properties of the combinations or compositions provided herein can be assessed by measuring such parameters as the maximum (peak) chemotherapeutic agent concentration (Cₘₐₓ), the peak time (i.e. when maximum chemotherapeutic agent concentration occurs; Tₘₐₓ), the minimum chemotherapeutic agent concentration (i.e. the minimum concentration between doses of chemotherapeutic agent; Cₘᵢₙ), the elimination half-life (T½) and area under the curve (i.e. the area under the curve generated by plotting time versus concentration; AUC), following administration. In instances where the chemotherapeutic agent is administered subcutaneously, the absolute bioavailability of the agent is determined by comparing the area under the curve of chemotherapeutic agent following subcutaneous delivery (AUCₛ) with the AUC of chemotherapeutic agent following intravenous delivery (AUCᵢᵥ). Absolute bioavailability (F), can be calculated using the formula: F=([AUC]_{sc}×dose_{sc})/([AUC]ᵢᵥ×doseᵢᵥ). The concentration of chemotherapeutic agent in the plasma following subcutaneous administration can be measured using any method known in the art suitable for assessing concentrations of chemotherapeutic agent in samples of blood.

[0758] A range of doses and different dosing frequency of dosing can be administered in the pharmacokinetic studies to assess the effect of increasing or decreasing concentrations of the co-administered agent (e.g. nucleoside analog). Pharmacokinetic properties of subcutaneously administered chemotherapeutic, such as bioavailability, also can be assessed with or without co-administration of polymer-conjugated hyaluronan-degrading enzyme and/or tumor-targeted taxane. For example, dogs, such as beagles, can be administered a chemotherapeutic (e.g. nucleoside analog such as gemcitabine) in combination with polymer-conjugated hyaluronan-degrading enzyme and/or tumor-targeted taxane, or alone, using one or more routes of administration. Such studies can be performed to assess the effect of co-administration with an anti-hyaluronan agent, such as a hyaluronidase, on pharmacokinetic properties, such as bioavailability, of chemotherapeutic agents.

[0759] Studies to assess safety and tolerability also are known in the art and can be used herein. Following administration of the combination and compositions herein, the development of any adverse reactions can be monitored. Adverse reactions can include, but are not limited to, injection site reactions, such as edema or swelling, headache, fever, fatigue, chills, flushing, dizziness, urticaria, wheezing or chest tightness, nausea, vomiting, rigors, back pain, chest pain, muscle cramps, seizures or convulsions, changes in blood pressure and anaphylactic or severe hypersensitivity responses. Typically, a range of doses and different dosing frequencies can be administered in the safety and tolerability studies to assess the effect of increasing or decreasing concentrations of chemotherapeutic agent and/or anti-hyaluronan agent, such as a polymer-conjugated hyaluronan-degrading enzyme, and/or tumor-targeted taxane in the dose.

### H. Methods and Uses of Combination Therapy

[0760] The combinations and compositions provided herein can be used in methods of therapy for treating cancers, and in particular solid tumor cancers, in subjects selected by the methods herein as one likely to benefit from treatment. The combinations and compositions include anti-hyaluronan agents, such as an hyaluronan degrading enzyme, such as a soluble hyaluronidase. The anti-hyaluronan agent can be modified to increase serum-half-life and/or to increase resistance to degradation by an endogenous protease. The anti-hyaluronan agent is combined with another anti-cancer agent. Anti-cancer agents, include chemotherapeutics, such as nucleoside analogs, immunotherapeutic, such as checkpoint inhibitors, oncolytic virus therapies, anti-cancer antibody therapies, cell therapies, and CAR-T therapies.

[0761] In the methods, a combination therapy of an anti-hyaluronan agent, such as a polymer-conjugated hyaluronan-degrading enzyme (e.g. a hyaluronidase, such as a PH20, for example PEGPH20) and an anti-cancer therapeutic, such as taxane formulation (e.g. an albumin-bound taxane formulation) is administered to a subject selected by the methods herein and having a solid tumor. In some examples, a further anti-cancer agent, such as nucleoside analog agent, and/or a immunotherapeutic agent, such as a checkpoint inhibitor or therapeutic virus or bacterium, also can be administered. In exemplary embodiments, the combination therapy includes an anti-hyaluronan agent, such as a soluble hyaluronidase, a tumor-targeted taxane, and a nucleoside analog agent or other chemotherapeutic agent that is a treatment for solid tumors and/or is susceptible to inhibition by deamination (e.g. gemcitabine or derivative thereof). The particular agents combined with the anti-hyaluronan agents depend upon the type of cancer/tumor to be treated. The methods herein are for selecting subjects for combination treatment with an anti-hyaluronan agent, such as a polymer-conjugated soluble hyaluronidase. Those with pancreatic cancer are exemplary of such subjects. The combination of treatment with a tumor-targeted taxane, such as nab-paclitaxel or nab-docetaxel, with a nucleoside analog, such as gemcitabine, is a recognized treatment for pancreatic cancer, in particular pancreatic ductal adenocarcinoma (PDAC). It is understood that the methods herein for selecting subjects for treatment that includes an anti-hyaluronan agent, such as a polymer-conjugated soluble hyaluronidase, can be used for selecting subjects with a variety of tumors and for treatment with other agents.

[0762] For treatments as exemplified herein, the intratumoral amount of a nucleoside analog, and hence the cytotoxic effects thereof, in a combination regimen with a polymer-conjugated hyaluronan-degrading enzyme and a taxane formulation can exceed the effects when the nucleoside analog is administered with only one of the agents (i.e. polymer-conjugated hyaluronan-degrading enzyme or taxane formulation). For example, the effects can be synergistic. The extent and level of nucleoside analog intratumoral activity observed in the combination achieves results that have heretofore not been achieved with existing therapies, including increased efficacy and survival that surpasses existing treatment regimes.

[0763] 1. Cancers

[0764] The combination therapy of an anti-hyaluronan agent, e.g. polymer-conjugated hyaluronan-degrading enzyme, taxane formulation and/or a nucleoside analog can be used for the treatment of cancerous cells, neoplasms, tumors and metastases in subjects selected for treatment with an anti-hyaluronan agent according to the methods provided herein. The combination therapy exhibits antitumor efficacy and results in a slowing or reduction of tumor growth, a decrease in tumor volume, and in some cases elimination or eradication of the tumor. The combination therapy results in increased survival of the selected subjects compared to treatment with the same agents as a single or double combination therapy. For cancers like pancreatic cancer that are difficult to treat, the combination therapy provides significant benefits compared to existing methods.

[0765] For example, the combination therapy can be used to treat a solid tumor, such as of the lung and bronchus, breast, colon and rectum, kidney, stomach, esophagus, liver and intrahepatic bile duct, urinary bladder, brain and other nervous system, head and neck, oral cavity and pharynx, cervix, uterine corpus, thyroid, ovary, testes, prostate, malignant melanoma, cholangiocarcinoma, thymoma, non-melanoma skin cancers, as well as hematologic tumors and/or malignancies, such as childhood leukemia and lymphomas, multiple myeloma, Hodgkin's disease, lymphomas of lymphocytic and cutaneous origin, acute and chronic leukemia such as acute lymphoblastic, acute myelocytic or chronic myelocytic leukemia, plasma cell neoplasm, lymphoid neoplasm and cancers associated with AIDS. Typically, the combination therapy is used for the treatment of solid tumors, for example, solid tumor stromal cancers. Exemplary tumors include, for example, pancreatic tumors, ovarian tumors, lung tumors, colon tumors, prostate tumors, cervical tumors and breast tumors.

[0766] In particular, the cancers can be hyaluronan-rich cancers that are suited for targeting by an anti-hyaluronan agent, such as a hyaluronan-degrading enzyme. Several hyaluronan-rich cancers have been identified. Hyaluronan-rich tumors include, but are not limited to, prostate, breast, colon, ovarian, stomach, head and neck and other tumors and cancers. In some cases, hyaluronan levels correlate with poor prognosis, for example, decreased survival rate and/or recurrence-free survival rate, metastases, angiogenesis, cancer cell invasion into other tissues/areas, and other indicators of poor prognosis. Such correlation has been observed, for example, in hyaluronan-rich tumors including ovarian cancer, SCC, ISC, prostate cancer, lung cancer, including non-small-cell lung cancer (NSCLC), breast cancer, colon cancer and pancreatic cancer (see, for example, Anttila et al., (2000) Cancer Research, 60:150-155; Karvinen et al., (2003) British Journal of Dermatology, 148:86-94; Lipponen et al., (2001) Eur. Journal of Cancer, 849-856; Pirinen et al., (2001) Int. J. Cancer: 95: 12-17; Auvinen et al., (2000) American Journal of Pathology, 156(2):529-536; Ropponen et al., (1998) Cancer Research, 58: 342-347). Thus, hyaluronan-rich cancers can be treated by administration of an anti-hyaluronan agent, such as a hyaluronidase, to treat one or more symptoms of the cancer.

[0767] In examples of treating hyaluronan-rich cancers in subjects selected for such treatment, the anti-hyaluronan agent, such as a hyaluronan-degrading enzyme, can act as a therapeutic by itself and/or it can enhance the activity of other co-administered or combination therapies. For example, hyaluronan-degrading enzymes, such as hyaluronidase, have direct anticarcinogenic effects when injected into tumors. Hyaluronidase prevents growth of tumors transplanted into mice (De Maeyer et al., (1992) Int. J. Cancer 51:657-660) and inhibits tumor formation upon exposure to carcinogens (Pawlowski et al. (1979) Int. J. Cancer 23:105-109). Hyaluronidase is effective as the sole therapeutic agent in the treatment of brain cancer (gliomas; see, International Pat. Pub. No. WO1988/02261).

[0768] Anti-hyaluronan agents, such as hyaluronan degrading enzymes, including hyaluronidases, can also be used to increase delivery of chemotherapeutic agents to tumors. The hyaluronan-degrading enzyme can be administered in combination with, for example, simultaneously or prior to, one or more other chemotherapeutic or other anti-cancer agent or treatment (e.g. treatment with a taxane formulation and/or treatment with a nucleoside analog). In some cases, the enzymes can increase the sensitivity of tumors that are resistant to conventional chemotherapy. For example, hyaluronan degrading enzymes, including hyaluronidases, such as rHuPH20, can be administered to a patient in an amount effective to increase diffusion around the tumor site (e.g., to facilitate circulation and/or concentrations of chemotherapeutic agents in and around the tumor site), inhibit tumor cell motility, such as by hyaluronic acid degradation, and/or to lower the tumor cell apoptosis threshold. This can bring the tumor cell(s) to a state of anoikis, which renders the tumor cell more susceptible to the action of chemotherapeutic agents. Administration of a hyaluronan-degrading enzyme, such as a hyaluronidase, can induce responsiveness of previously chemotherapy-resistant tumors of the pancreas, stomach, colon, ovaries, and breast (Baumgartner et al. (1988) Reg. Cancer Treat. 1:55-58; Zanker et al. (1986) Proc. Amer. Assoc. Cancer Res. 27:390). The hyaluronan degrading enzyme, such as a hyaluronidase, typically enhances penetration of chemotherapeutic or other anti-cancer agents into solid tumors, thereby treating the disease.

[0769] 2. Dosage and Administration

[0770] The combination therapy provided herein containing an anti-hyaluronan agent, such as a hyaluronan-degrading enzyme, such as a polymer-conjugated soluble hyaluronidase, and a tumor-targeted taxane, and optionally in further combination with a nucleoside analog or other anti-cancer therapeutic, for the treatment of subjects selected according to the methods provided herein as benefiting from treatment that includes administering an anti-hyaluronan agent, is administered in an amount sufficient to exert a therapeutically useful effect. Typically, the active agents are administered in an amount that does not result in undesirable side effects of the patient being treated, or that minimizes or reduces the observed side effects as compared to dosages and amounts required for single treatment with one of the above agents. For example, it is found that the combination therapy with a polymer-conjugated hyaluronan-degrading enzyme and a tumor-targeted taxane results in increased intratumoral delivery and increased intratumoral half-life of a co-administered nucleoside analog, e.g. a gemcitabine. Thus, the amount of a nucleoside analog (e.g. gemcitabine) that can be administered in the combination therapy provided herein, compared to the amounts of a nucleoside analog administered using prior art methods (e.g. gemcitabine monotherapy or dual therapy in conjunction with one other agent) is reduced, while achieving substantially the same or improved therapeutic efficacy. By virtue of the decreased dosage that is administered, side effects associated with nucleoside analog (e.g. gemcitabine) administration, such as immunosuppression or myelosuppression, are reduced, minimized or avoided.

[0771] It is within the level of one of skill in the art to determine the precise amounts of active agents, including anti-hyaluronan agent, e.g., polymer-conjugated hyaluronan-degrading enzyme, tumor-targeted taxane, and optionally a nucleoside analog, to be administered to a subject. For example, such agents and uses for treating diseases and conditions, such as cancers and solid tumors, are well known in the art. Thus, dosages of such agents in a composition or combination therapy can be chosen based on standard dosing regimes for that agent under a given route of administration.

[0772] It is understood that the precise dosage and duration of treatment is a function of the tissue or tumor being treated and may be determined empirically using known testing protocols or by extrapolation from in vivo or in vitro test data and/or can be determined from known dosing regimes of the particular agent. It is to be noted that concentrations and dosage values may also vary with the age of the individual treated, the weight of the individual, the route of administration and/or the extent or severity of the disease and other factors that are within the level of a skilled medical practioner to consider. Generally, dosage regimens are chosen to limit toxicity. It should be noted that the attending physician would know how to and when to terminate, interrupt or adjust therapy to lower dosage due to toxicity, or bone marrow, liver or kidney or other tissue dysfunctions. Conversely, the attending physician would also know how to and when to adjust treatment to higher levels if the clinical response is not adequate (precluding toxic side effects). It is to be further understood that for any particular subject, specific dosage regimens should be adjusted over time according to the individual need and the professional judgment of the person administering or supervising the administration of the formulations, and that the concentration ranges set forth herein are exemplary only and are not intended to limit the scope thereof

[0773] For example, the polymer-conjugated hyaluronan-degrading enzyme, such as a hyaluronidase for example a PH20 (e.g. PEGPH20), is administered in a therapeutically effective amount to degrade or cleave tumor-associated hyaluronan. The amount of a hyaluronan degrading enzyme, such as a soluble hyaluronidase, to be administered for the treatment of a disease or condition, for example a cancer or solid tumor such as an HA-rich tumor, can be determined by standard clinical techniques. In addition, in vitro assays and animal models can be employed to help identify optimal dosage ranges. The precise dosage, which can be determined empirically, can depend on the particular enzyme, the route of administration, the type of disease to be treated and the seriousness of the disease. Exemplary dosage range is at or about 50 Units to 50,000,000 Units of a hyaluronan-degrading enzyme conjugated to a polymer, or a functionally equivalent amount of another hyaluronan degrading enzyme conjugated to a polymer. It is understood herein that a unit of activity is normalized to a standard activity, for example, an activity as measured in a microturbidity assay assaying hyaluronidase activity.

[0774] Thus, for example, a hyaluronan-degrading enzyme, such as a hyaluronidase for example a PH20, conjugated to polymer, for example, a PEG, can be administered at or about 10 to 50,000,000 Units, 10 to 40,000,000 Units, 10 to 36,000,000 Units, 10 to 12,000,000 Units, 10 to 1,200,000 Units, 10 to 1,000,000 Units, 10 to 500,000 Units, 100 to 100,000 Units, 500 to 50,000 Units, 1000 to 10,000 Units, 5000 to 7500 Units, 5000 Units to 50,000 Units, or 1,000 to 10,000 Units. Generally, a polymer-conjugated hyaluronan-degrading enzyme is administered to a subject in an amount that is between or about between 0.01 μg/kg to 25 mg/kg, such as 0.0005 mg/kg (0.5 μg/kg) to 25 mg/kg, 0.5 μg/kg to 10 mg/kg, 0.02 mg/kg to 1.5 mg/kg, 0.01 μg/kg to 15 μg/kg, 0.05 μg/kg to 10 μg/kg, 0.75 μg/kg to 7.5 μg/kg or 1.0 μg/kg to 3.0 μg/kg. The polymer-conjugated hyaluronan-degrading enzyme can be administered, for example, at a dosage of at least or about at least 0.0005 mg/kg (of the subject), 0.0006 mg/kg, 0.0007 mg/kg, 0.0008 mg/kg, 0.0009 mg/kg, 0.001 mg/kg, 0.0016 mg/kg, 0.002 mg/kg, 0.003 mg/kg, 0.004 mg/kg, 0.005 mg/kg, 0.006 mg/kg, 0.007 mg/kg, 0.008 mg/kg, 0.009 mg/kg, 0.01 mg/kg, 0.016 mg/kg, 0.02 mg/kg, 0.03 mg/kg, 0.04 mg/kg, 0.05 mg/kg, 0.06 mg/kg, 0.07 mg/kg, 0.08 mg/kg, 0.09 mg/kg, 0.1 mg/kg, 0.15 mg/kg, 0.2 mg/kg, 0.25 mg/kg, 0.30 mg/kg, 0.35 mg/kg, 0.40 mg/kg, 0.45 mg/kg, 0.5 mg/kg, 0.55 mg·kg, 0.6 mg/kg, 0.7 mg/kg, 0.8 mg/kg, 0.9 mg/kg, 1.0 mg/kg, 1.1 mg/kg, 1.2 mg/kg, 1.3 mg/kg, 1.4 mg/kg, 1.5 mg/kg, 1.6 mg/kg, 1.7 mg/kg, 1.8 mg/kg, 1.9 mg/kg, 2 mg/kg, 2.5 mg/kg, 3 mg/kg, 3.5 mg/kg, 4 mg/kg, 4.5 mg/kg, 5 mg/kg, 5.5 mg/kg, 6 mg/kg, 6.5 mg/kg, 7 mg/kg, 7.5 mg/kg, 8 mg/kg, 8.5 mg/kg, 9 mg/kg, 9.5 mg/kg, 10 mg/kg, 11 mg/kg, 12 mg/kg, 13 mg/kg, 14 mg/kg, 15 mg/kg, 16 mg/kg, 17 mg/kg, 18 mg/kg, 19 mg/kg, 20 mg/kg, 21 mg/kg, 22 mg/kg, 23 mg/kg, 24 mg/kg, 25 mg/kg, or more is administered, to an average adult human subject, typically weighing about 70 kg to 75 kg.

[0775] A polymer-conjugated hyaluronan-degrading enzyme, such as a PEGylated hyaluronidase (e.g. PEGPH20), provided herein can be administered at between or about between 1 Unit/kg to 800,000 Units/kg, such as 10 to 800,000 Units/kg, 10 to 750,000 Units/kg, 10 to 700,000 Units/kg, 10 to 650,000 Units/kg, 10 to 600,000 Units/kg, 10 to 550,000 Units/kg, 10 to 500,000 Units/kg, 10 to 450,000 Units/kg, 10 to 400,000 Units/kg, 10 to 350,000 Units/kg, 10 to 320,000 Units/kg, 10 to 300,000 Units/kg, 10 to 280,000 Units/kg, 10 to 260,000 Units/kg, 10 to 240,000 Units/kg, 10 to 220,000 Units/kg, 10 to 200,000 Units/kg, 10 to 180,000 Units/kg, 10 to 160,000 Units/kg, 10 to 140,000 Units/kg, 10 to 120,000 Units/kg, 10 to 100,000 Units/kg, 10 to 80,000 Units/kg, 10 to 70,000 Units/kg, 10 to 60,000 Units/kg, 10 to 50,000 Units/kg, 10 to 40,000 Units/kg, 10 to 30,000 Units/kg, 10 to 20,000 Units/kg, 10 to 15,000 Units/kg, 10 to 12,800 Units/kg, 10 to 10,000 Units/kg, 10 to 9,000 Units/kg, 10 to 8,000 Units/kg, 10 to 7,000 Units/kg, 10 to 6,000 Units/kg, 10 to 5,000 Units/kg, 10 to 4,000 Units/kg, 10 to 3,000 Units/kg, 10 to 2,000 Units/kg, 10 to 1,000 Units/kg, 10 to 900 Units/kg, 10 to 800 Units/kg, 10 to 700 Units/kg, 10 to 500 Units/kg, 10 to 400 Units/kg, 10 to 300 Units/kg, 10 to 200 Units/kg, 10 to 100 Units/kg, 16 to 600,000 Units/kg, 16 to 500,000 Units/kg, 16 to 400,000 Units/kg, 16 to 350,000 Units/kg, 16 to 320,000 Units/kg, 16 to 160,000 Units/kg, 16 to 80,000 Units/kg, 16 to 40,000 Units/kg, 16 to 20,000 Units/kg, 16 to 16,000 Units/kg, 16 to 12,800 Units/kg, 16 to 10,000 Units/kg, 16 to 5,000 Units/kg, 16 to 4,000 Units/kg, 16 to 3,000 Units/kg, 16 to 2,000 Units/kg, 16 to 1,000 Units/kg, 16 to 900 Units/kg, 16 to 800 Units/kg, 16 to 700 Units/kg, 16 to 500 Units/kg, 16 to 400 Units/kg, 16 to 300 Units/kg, 16 to 200 Units/kg, 16 to 100 Units/kg, 160 to 12,800 Units/kg, 160 to 8,000 Units/kg, 160 to 6,000 Units/kg, 160 to 4,000 Units/kg, 160 to 2,000 Units/kg, 160 to 1,000 Units/kg, 160 to 500 Units/kg, 500 to 5000 Units/kg, 1000 to 100,000 Units/kg or 1000 to 10,000 Units/kg, of the mass of the subject to whom it is administered. In some examples, a hyaluronan-degrading enzyme, such as a polymer-conjugated hyaluronan-degrading enzyme, such as a PEGylated hyaluronidase (e.g. PEGPH20) can be administered at or about 1 Unit/kg to 1000 Units/kg, 1 Units/kg to 500 Units/kg or 10 Units/kg to 50 Units/kg.

[0776] Generally, where the specific activity of the PEGylated hyaluronidase is or is about 10,000 U/mg to 80,000 U/mg, such as 20,000 U/mg to 60,000 U/mg or 18,000 U/mg to 45,000 U/mg, generally at or about 1 Units/kg (U/kg), 2 U/kg, 3 U/kg, 4 U/kg, 5 U/kg, 6 U/kg, 7 U/kg, 8 U/kg, 8 U/kg 10 U/kg, 16 U/kg, 32 U/kg, 64 U/kg, 100 U/kg, 200 U/kg, 300 U/kg, 400 U/kg, 500 U/kg, 600 U/kg, 700 U/kg, 800 U/kg, 900 U/kg, 1,000 U/kg, 2,000 U/kg, 3,000 U/kg, 4,000 U/kg, 5,000 U/kg, 6,000 U/kg, 7,000 U/kg, 8,000 U/kg, 9,000 U/kg, 10,000 U/kg, 12,800 U/kg, 20,000 U/kg, 32,000 U/kg, 40,000 U/kg, 50,000 U/kg, 60,000 U/kg, 70,000 U/kg, 80,000 U/kg, 90,000 U/kg, 100,000 U/kg, 120,000 U/kg, 140,000 U/kg, 160,000 U/kg, 180,000 U/kg, 200,000 U/kg, 220,000 U/kg, 240,000 U/kg, 260,000 U/kg, 280,000 U/kg, 300,000 U/kg, 320,000 U/kg, 350,000 U/kg, 400,000 U/kg, 450,000 U/kg, 500,000 U/kg, 550,000 U/kg, 600,000 U/kg, 650,000 U/kg, 700,000 U/kg, 750,000 U/kg, 800,000 U/kg or more, per mass of the subject, is administered. For example, 60,000 U; 70,000 U; 80,000 U; 90,000 U; 100,000 U; 200,000 U; 300,000 U; 400,000 U; 500,000 U; 600,000 U; 700,000 U; 800,000 U; 900,000 U; 1,000,000 U; 1,500,000 U; 2,000,000 U; 2,500,000 U; 3,000,000 U; 3,500,000 U; 4,000,000 U or more is administered.

[0777] In examples herein, tumor-targeted taxane, such as an albumin-bound taxane (e.g. albumin-bound paclitaxel), is administered in a therapeutically effective amount sufficient to achieve intratumoral delivery. In some examples, a tumor-targeted taxane, such as an albumin-bound taxane (e.g. albumin-bound paclitaxel) is administered in a therapeutically effective amount to reduce intratumoral deaminase (e.g. cytidine deaminase) protein levels compared to the absence of treatment, such as to reduce or decrease the levels by at least or about at least 10%, 20%, 30%, 40%, 50%, 60%, 70%, 80%, 90% or more. In particular examples, a tumor-targeted taxane, such as an albumin-bound taxane (e.g. albumin-bound paclitaxel) is administered in a therapeutically effective amount to increase the intratumoral level of a co-administered nucleoside analog (e.g. gemcitabine or derivative) compared to the absence of treatment. For example, intratumoral gemcitabine is increased by at least or about at least 10%, 20%, 30%, 40%, 50%, 60%, 70%, 80%, 90% or more. The amount of a tumor-targeted taxane, such as an albumin-bound taxane (e.g. albumin-bound paclitaxel) to be administered for the treatment of a disease or condition, for example a cancer or solid tumor such as an HA-rich tumor, can be determined by standard clinical techniques. In addition, in vitro assays and animal models can be employed to help identify optimal dosage ranges. The precise dosage, which can be determined empirically, can depend on the particular taxane, the particular formulation (e.g. nanoparticle or lipsome formulation), the route of administration, the type of disease to be treated and the seriousness of the disease.

[0778] Typically, a tumor-targeted taxane, such as an albumin-bound taxane (e.g. albumin-bound paclitaxel) is administered to a subject relative to the body surface area (BSA; m²) of the subject of between or about between 1 mg/m² to 1000 mg/m², such as between or about between 10 mg/m² to 500 mg/m², 50 mg/m² to 400 mg/m², 25 mg/m² to 300 mg/m², and generally at least or about at least or about or 20 mg/m², 30 mg/m², 40 mg/m², 50 mg/m², 60 mg/m², 70 mg/m², 80 mg/m², 90 mg/m², 100 mg/m², 150 mg/m², 200 mg/m², 250 mg/m², or 300 mg/m². In some cases, lower dosages of a tumor-targeted taxane, such as an albumin-bound taxane (e.g. albumin-bound paclitaxel), can be administered to subjects compared to existing formulations or dosage regimes. For example, a tumor-targeted taxane, such as an albumin-bound taxane (e.g. albumin-bound paclitaxel), is administered to a subject in an amount that is at least or about at least 50 mg/m² or 100 mg/m², but that is less than 260 mg/m², 200 mg/m² or 150 mg/m². In other examples, the dosage that is administered per administration is the same as existing dosages and dosage regimens, but the dosage schedule is reduced so that a lower amount of nucleoside analog is administered per cycle of administration. In other cases, higher dosages of a tumor-targeted taxane, such as an albumin-bound taxane (e.g. albumin-bound paclitaxel), can be administered to subjects compared to existing formulations or dosage regimes. For example, a tumor-targeted taxane, such as an albumin-bound taxane (e.g. albumin-bound paclitaxel), is administered to a subject in an amount that is at least or about at least 300 mg/m², such as between or about between 300 mg/m² to 1000 mg/m². It is within the level of one of skill in the art to convert or determine corresponding dosages in mg/kg based on the height and weight of a subject. For example, the BSA is determined by the formula (height (cm)×weight (kg)/3600)^{1/2}. The BSA of an average adult is 1.73 m².

[0779] In examples herein, the combination therapy optionally contains further administration of a nucleoside analog (e.g. a gemcitabine or derivative or other analog). The gemictabine is administered in a therapeutically effective amount sufficient to achieve intratumoral delivery. In particular examples, the nucleoside analog (e.g. a gemciatbine or derivative or other analog) is co-administered in the combination therapy herein in an amount to achieve an intratumoral level that is at least 1.5-fold, 2-fold, 3-fold, 4-fold, 5-fold 10-fold or more increased compared to the intratumoral level when administered alone. The amount of a nucleoside analog (e.g. gemcitabine, derivative thereof or other analog described herein) to be administered for the treatment of a disease or condition, for example a cancer or solid tumor such as an HA-rich tumor, can be determined by standard clinical techniques. In addition, in vitro assays and animal models can be employed to help identify optimal dosage ranges. The precise dosage, which can be determined empirically, can depend on the particular nucleoside analog, the particular formulation, the route of administration, the type of disease to be treated and the seriousness of the disease.

[0780] Typically, a nucleoside analog (e.g. gemcitabine or derivative thereof or other analog) is administered to a subject relative to the body surface area (BSA; m²) of the subject of between or about between 100 mg/m² to 2500 mg/m², such as between or about between 500 mg/m² to 2000 mg/m², 750 mg/m² to 1500 mg/m², 1000 mg/m² to 1500 mg/m², or 500 mg/m² to 1500 mg/m², and generally at least or about at least or about or 500 mg/m², 600 mg/m², 700 mg/m², 800 mg/m², 900 mg/m², 1000 mg/m², 1250 mg/m², 1500 mg/m², 1750 mg/m², 2000 mg/m² or more. In some cases, lower dosages of a nucleoside analog (e.g. gemcitabine or derivative thereof or other taxane), can be administered to subjects compared to existing formulations or dosage regimes. For example, a nucleoside analog (e.g. gemcitabine or derivative thereof or other taxane), is administered to a subject in an amount that is at least or about at least 200 mg/m² or 500 mg/m², but that is less than 1000 mg/m² or 1250 mg/m². In other cases, the dosage that is administered per administration is the same as existing dosages and dosage regimines, but the dosage schedule is reduced so that a lower amount of nucleoside analog is administered per cycle of administration. It is within the level of one of skill in the art to determine the corresponding dosage in mg/kg.

[0781] The agents provided herein can be administered intravenously, subcutaneously, intratumorally, intradermally, orally or by other routes of administration. The particular route can differ between the administered agents or can be the same. For example, one or more, or all agents, can be administered subcutaneously. In particular examples, it is contemplated herein that a polymer-conjugated hyaluronan-degrading enzyme can be administered subcutaneously. In such examples, the polymer-conjugated hyaluronan-degrading enzyme is administered in a dosage regimen that permits 1-8 hours, such as 1-2 hours, of absorption to achieve bioavailable enzyme in the bloodstream in order to result in similar tumor activity as a simultaneous intravenous dosage regimen. In examples herein, the tumor-targeted taxane and/or nucleoside analog also can be administered subcutaneously. The particular subcutaneous formulation or co-formulation of the one or more agents is provided so as to achieve sufficient bioavailability of the agent and to minimize injection site reactions.

[0782] In another example, one or more, or all agents, can be administered intravenously. In such an example, one or more, or all, of the agents can be administered by push or by infusion. The push or infusion time can be 1 minute to 60 minutes, and generally about 10 minutes to 40 minutes and no more than 60 minutes. The agents can be administered by concurrent infusion or by subsequent infusion. In one example, two of the agents or all three of the administered agents in the combination therapy provided herein are simultaneously infused. In such an example, the administered agents are provided in the same composition for infusion together in the same bag. In other cases, the administered agents are provided in separate compositions, but are combined into a single bag as one infusate just prior to infusion. In a further example, the administered agents are simultaneously or near simultaneously infused or subsequently infused, and hang in separate bags for separate infusions.

[0783] 3. Dosage Regimen: Frequency and Cycle of Administration

[0784] The anti-hyaluronan agent, such as the polymer-conjugated hyaluronan-degrading enzyme, can be administered prior to, simultaneously or near simultaneously, sequentially or intermittently with the tumor-targeted taxane. For example, the anti-hyaluronan agent, e.g., polymer-conjugated hyaluronan-degrading enzyme, and tumor-targeted taxane can be co-administered together or separately. If administered separately, the agents can be administered immediately apart from each other, such as administered within 30 seconds to 15 minutes of each other, such as less than 15 minutes, 14 minutes, 12 minutes, 10 minutes, 5 minutes, 2 minutes, 1 minute or 30 seconds apart from each other. In other cases, the anti-hyaluronan agent, such as the polymer-conjugated hyaluronan-degrading enzyme, and tumor-targeted taxane are administered sequentially and/or intermittently. In such examples, the anti-hyaluronan agent, e.g., the hyaluronan-degrading enzyme, can be administered first or the tumor-targeted taxane can be administered first. Generally, the anti-hyaluronan agent, such as a hyaluronan-degrading enzyme, is administered prior to the tumor-targeted taxane. For example, the anti-hyaluronan agent, or hyaluronan-degrading enzyme, is administered at least or at least about or about or 5 minutes, 15 minutes, 30 minutes, 1 hour, 2 hours, 3 hours, 4 hours, 6 hours, 8 hours, 12 hours, 16 hours, 18 hours, 20 hours, 22 hours, 24 hours, 30 hours, 36 hours, 40 hours or 48 hours prior to administration of the tumor-targeted taxane.

[0785] In examples of the combination therapy, the nucleoside analog, or other anti-cancer therapeutic, can be administered prior to, simultaneously or near simultaneously, sequentially or intermittently with the anti-hyaluronan agent (e.g. hyaluronan-degrading enzyme, such as a polymer-conjugated soluble hyaluronidase) and/or tumor-targeted taxane. The nucleoside analog can be co-administered together or separately with one or both of the anti-hyaluronan agent (e.g. hyaluronan-degrading enzyme) and/or tumor-targeted taxane. If administered separately, the nucleoside analog can be administered immediately before or after administration of the anti-hyaluronan agent, such as the hyaluronan-degrading enzyme, and/or tumor-targeted taxane, such as administered within 30 seconds to 15 minutes of each other, such as less than 15 minutes, 14 minutes, 12 minutes, 10 minutes, 5 minutes, 2 minutes, 1 minute or 30 seconds apart from the anti-hyaluronan agent (e.g. hyaluronan-degrading enzyme) and/or tumor-targeted taxane. Generally, the nucleoside analog is administered after the anti-hyaluronan agent, such as the hyaluronan-degrading enzyme. In some cases, the nucleoside analog is administered after the anti-hyaluronan agent, such as the hyaluronan-degrading enzyme, and tumor-targeted taxane. For example, the nucleoside analog is administered at least or at least about or about or 5 minutes, 15 minutes, 30 minutes, 1 hour, 2 hours, 3 hours, 4 hours, 6 hours, 8 hours, 12 hours, 16 hours, 18 hours, 20 hours, 22 hours, 24 hours, 30 hours, 36 hours, 40 hours or 48 hours after administration of the anti-hyaluronan agent (e.g. hyaluronan-degrading enzyme) and/or tumor-targeted taxane.

[0786] In one example herein, the anti-hyaluronan agent, such as the hyaluronan-degrading enzyme, is administered separately from the other agents and is administered immediately before or after the tumor-targeted taxane. For example, the hyaluronan-degrading enzyme is administered less than 15 minutes, 14 minutes, 12 minutes, 10 minutes, 5 minutes, 2 minutes, 1 minute or 30 seconds before or after the tumor-targeted taxane. In such examples, the nucleoside analog is administered after the anti-hyaluronan agent (e.g. hyaluronan-degrading enzyme) and tumor-targeted taxane. For example, the nucleoside analog is administered at least or at least about or about or 5 minutes, 15 minutes, 30 minutes, 1 hour, 2 hours, 3 hours, 4 hours, 6 hours, 8 hours, 12 hours, 16 hours, 18 hours, 20 hours, 22 hours, 24 hours, 30 hours, 36 hours, 40 hours or 48 hours after administration of the hyaluronan-degrading enzyme and tumor-targeted taxane.

[0787] In another example, the anti-hyaluronan agent, such as the hyaluronan-degrading enzyme, is administered before the tumor-targeted taxane, which is administered before the nucleoside analog. For example, the anti-hyaluronan agent (e.g., hyaluronan-degrading enzyme) is administered at least or at least about or about or 5 minutes, 15 minutes, 30 minutes, 1 hour, 2 hours, 3 hours, 4 hours, 6 hours, 8 hours, 12 hours, 16 hours, 18 hours, 20 hours, 22 hours, 24 hours, 30 hours, 36 hours, 40 hours or 48 hours before administration of the tumor-targeted taxane. In such an example, the nucleoside analog is administered at least or at least about or about or 5 minutes, 15 minutes, 30 minutes, 1 hour, 2 hours, 3 hours, 4 hours, 6 hours, 8 hours, 12 hours, 16 hours, 18 hours, 20 hours, 22 hours, 24 hours, 30 hours, 36 hours, 40 hours or 48 hours after administration of the tumor-targeted taxane.

[0788] The frequency and timing of administration, and the dosage amounts, can be administered periodically over a cycle of administration to maintain a continuous and/or long term effect of the active agents for a desired length of time. The combinations or compositions can be administered hourly, daily, weekly, monthly, yearly or once. The length of time of the cycle of administration can be empirically determined, and is dependent on the disease to be treated, the severity of the disease, the particular patient, and other considerations within the level of skill of the treating physician. The length of time of treatment with a combination therapy provided herein can be one week, two weeks, one months, several months, one year, several years or more. The dosages can be divided into a plurality of cycles of administration during the course of treatment. For example, a modified hyaluronidase enzyme can be administered twice weekly over a period of a year or more. If disease symptoms persist in the absence of discontinued treatment, treatment can be continued for an additional length of time. Over the course of treatment, evidence of disease and/or treatment-related toxicity or side effects can be monitored.

[0789] In addition, the cycle of administration can be tailored to add periods of discontinued treatment in order to provide a rest period from exposure to the agents. The length of time for the discontinuation of treatment can be for a predetermined time or can be empirically determined depending on how the patient is responding or depending on observed side effects. For example, the treatment can be discontinued for one week, two weeks, one month or several months. Generally, the period of discontinued treatment is built into a cycle of dosing regimen for a patient.

[0790] For example, an exemplary dosing regimen is a treatment cycle or cycle of administration of 28 days. The agent, such as the anti-hyaluronan agent, e.g., polymer-conjugated hyaluronan-degrading enzyme, tumor-targeted taxane and/or nucleoside analog, can be administered once weekly or twice weekly. For example, the agent can be administered for the first 3 weeks, once weekly or twice weekly, followed by a one week without dosing. Thus, for example, a patient can be dosed with the agent twice weekly on days 1, 4, 8, 11, 15 and 18 (or days 0, 3, 6, 9, 12 and 15), followed by a one-week of discontinued treatment, over the course of the 28-day cycle. In another example, a patient can be dosed with the agent once weekly on days 1, 8 and 16, followed by a one-week of discontinued treatment over the course of the 28-day cycle. In another example, the agent can be administered for the full 28 days once weekly or twice weekly. Thus, for example, a patient can be dosed with the agent twice weekly on days 1, 4, 8, 11, 15, 18, 21 and 24 (or days 0, 4, 7, 11, 14, 18, 21 or 25) for the full 28 day cycle. In other examples, a patient can be dosed with the agent once weekly on days 1, 8, 16 or 24 for the full 28 day cycle. It is understood that the above description is for exemplification purposes only and that variations of the above can be employed. Further, similar cycles of administration can be applied to all administered agents, or each administered agent can be employed in its own dosing regimine in the combination therapy provided herein.

[0791] It is within the level of one of skill in the art to determine the precise cycle of administration and dosing schedule. As noted above, the cycle of administration can be for any desired length of time. Hence, the 28-day cycle of administration can be repeated for any length of time. It is within the level of skill of the treating physician to adopt a cycle of administration and dosing regimen that meets the needs of the patient depending on personal considerations specific to the patient and disease to be treated.

[0792] Generally, the timing of administration of the nucleoside analog, for example gemcitabine or derivative, is typically a function of the cycle of administration of the anti-hyaluronan agent, e.g., polymer conjugated-hyaluronan-degrading enzyme, and/or tumor-targeted taxane. For example, the nucleoside analog can be adminstered after the first administration of the anti-hyaluronan agent, such as the hyaluronan-degrading enzyme, and/or tumor-targeted taxane in a cycle of administration, and/or after any one or more subsequent administrations in the cycle. In other examples, the nucleoside analog is administered after each subsequent administration of the anti-hyaluronan agent (e.g. hyaluronan-degrading enzyme) and/or tumor-targeted taxane in the cycle, after every other subsequent administration of the hyaluronan-degrading enzyme and/or tumor-targeted taxane in the cycle, or is administered once a week, once every two weeks, once every three weeks, or once a month during the cycle of administration of the anti-hyaluronan agent, e.g. hyaluronan-degrading enzyme, and/or tumor-targeted taxane. In some examples, the nucleoside analog is only administered once per cycle of administration of the anti-hyaluronan agent, e.g. hyaluronan-degrading enzyme, and/or tumor-targeted taxane. In an additional example, the nucleoside analog is administered intermittently between cycles of administration. For example, the nucleoside analog is not administered during the first cycle of administration, but is administered during a second cycle, followed by skipping the third cycle and administered again during a fourth cycle, etc. . . . or any variation thereof.

[0793] In particular examples of the combination therapy herein, the methods include administering an anti-hyaluronan agent and a tumor-targeted taxane simultaneously or near simultaneously, for example concomitantly. The anti-hyaluronan agent and tumor-targeted taxane can be administered at a frequency of administration of twice weekly or once weekly for a predetermined number of weeks. In particular, the anti-hyaluronan agent is administered twice weekly and the tumor-targeted taxane is administered once weekly. Optionally, a nucleoside analog also can be administered in the combination therapy. For example, the nucleoside analog is administered once weekly for a predetermined number of weeks, and typically the nucleoside analog is administered one week after administration of the anti-hyaluronan agent and the tumor-targeted taxane. The method also can include administration of a corticosteroid prior to, concurrent with, intermittently with or subsequent to administration of the anti-hyaluronan agent. The cycle of administration can be for any time period, and is within the level of the treating physician or clinician. Typically, the predetermined number of weeks is 3 weeks or 4 weeks, but can be longer. The cycle of administration can be repeated a plurality of times depending on the disease status and response of the subject.

[0794] 4. Additional Combination Therapies

[0795] The combination therapy provided herein can be used alone or in further combination with other therapies or treatments. Other therapies and treatments can be used with the hyaluronan degrading enzyme, such as polymer-conjugated soluble hyaluronidase. The combinations or compositions provided herein can be further co-formulated or co-administered together with, prior to, intermittently with, or subsequent to, other therapeutic or pharmacologic agents or treatments, such as procedures. For example, such agents include, but are not limited to, other biologics, anti-cancer agents, small molecule compounds, dispersing agents, anesthetics, checkpoint inhibitors, vasoconstrictors, surgery, radiation, a chemotherapeutic agent, a biological agent, a polypeptide, an antibody, a peptide, a small molecule, a gene therapy vector, a virus and DNA and combinations thereof. Such agents also can include one or more agents to ameliorate, reduce or prevent side effects. In some cases, the combination therapy can be used in combination with one or more cancer treatments that remove the primary tumor or that immunosuppress the subject prior to treatment. For example, additional chemotherapy or radiation therapy can be used in addition to the combination therapy provided herein. Such additional therapy can have the effect of weakening a subject's immune system. In other examples, surgical removal and/or immune-system weakening therapy may not be necessary. Exemplary other methods that can be combined therein include administering a compound that decreases the rate of proliferation of the tumor or neoplastic cells without weakening the immune system (e.g., by administering tumor suppressor compounds or by administering tumor cell-specific compounds) or administering an angiogenesis-inhibiting compound.

[0796] A preparation of a second agent or agents or treatment or treatments can be administered at once, or can be divided into a number of smaller doses to be administered at intervals of time. Selected agent/treatment preparations can be administered in one or more doses over the course of a treatment time for example over several hours, days, weeks, or months. In some cases, continuous administration is useful. It is understood that the precise dosage and course of administration depends on the indication and patient's tolerability. Generally, dosing regimes for second agents/treatments herein are known to one of skill in the art.

[0797] a. Corticosteroids

[0798] The combination therapies provided herein can be used alone or in combination with one or more corticosteroids. A corticosteroid is administered in an amount that is therapeutically effective to ameliorate or reduce one or more adverse effects of administration of a polymer-conjugated hyaluronan degrading enzymes, such as a polymer-conjugated soluble hyaluronidase, or other agent, in particular, adverse musculoskeletal effects. A therapeutically effective amount is the dosage sufficient to ameliorate, prevent, eliminate or reduce one or more symptoms or adverse effects. Indicators of improvement or successful pretreatment include determination of the failure to manifest a relevant score on the CTCAE scale or a change in grading or severity on the CTCAE scale.

[0799] Corticosteroids are a class of steroid hormones that are produced in the adrenal cortex. Corticosteroids are involved in a wide range of physiologic systems such as stress response, immune response and regulation of inflammation, carbohydrate metabolism, protein catabolism, blood electrolyte levels, and behavior. These include glucocorticoids, which are anti-inflammatory agents with a large number of other functions and mineralocorticoids, which control salt and water balance primarily through action on the kidneys.

[0800] Glucocorticoids are a class of steroid hormones, e.g., corticosteroids, that bind to the glucocorticoid receptor. Glucocorticoids cause their effects by binding to the glucocorticoid receptor. Among other activities, the activated glucocorticoid complex in turn up-regulates the expression of anti-inflammatory proteins in the nucleus and represses the expression of pro-inflammatory proteins in the cytosol by preventing the translocation of other transcription factors from the cytosol into the nucleus.

[0801] Generally, any corticosteroid, e.g., glucocorticoid, can be used in the methods or combinations provided herein. The glucocorticoids include synthetic and non-synthetic glucocorticoids. Exemplary glucocorticoids include, but are not limited to: alclometasones, algestones, beclomethasones (e.g. beclomethasone dipropionate), betamethasones (e.g. betamethasone 17-valerate, betamethasone sodium acetate, betamethasone sodium phosphate, betamethasone valerate), budesonides, clobetasols (e.g. clobetasol propionate), clobetasones, clocortolones (e.g. clocortolone pivalate), cloprednols, corticosterones, cortisones and hydrocortisones (e.g. hydrocortisone acetate), cortivazols, deflazacorts, desonides, desoximetasones, dexamethasones (e.g. dexamethasone 21-phosphate, dexamethasone acetate, dexamethasone sodium phosphate), diflorasones (e.g. diflorasone diacetate), diflucortolones, difluprednates, enoxolones, fluazacorts, flucloronides, fludrocortisones (e.g., fludrocortisone acetate), flumethasones (e.g. flumethasone pivalate), flunisolides, fluocinolones (e.g. fluocinolone acetonide), fluocinonides, fluocortins, fluocortolones, fluorometholones (e.g. fluorometholone acetate), fluperolones (e.g., fluperolone acetate), fluprednidenes, fluprednisolones, flurandrenolides, fluticasones (e.g. fluticasone propionate), formocortals, halcinonides, halobetasols, halometasones, halopredones, hydrocortamates, hydrocortisones (e.g. hydrocortisone 21-butyrate, hydrocortisone aceponate, hydrocortisone acetate, hydrocortisone buteprate, hydrocortisone butyrate, hydrocortisone cypionate, hydrocortisone hemisuccinate, hydrocortisone probutate, hydrocortisone sodium phosphate, hydrocortisone sodium succinate, hydrocortisone valerate), loteprednol etabonate, mazipredones, medrysones, meprednisones, methylprednisolones (methylprednisolone aceponate, methylprednisolone acetate, methylprednisolone hemi succinate, methylprednisolone sodium succinate), mometasones (e.g., mometasone furoate), paramethasones (e.g., paramethasone acetate), prednicarbates, prednisolones (e.g. prednisolone 25-diethylaminoacetate, prednisolone sodium phosphate, prednisolone 21-hemisuccinate, prednisolone acetate; prednisolone farnesylate, prednisolone hemisuccinate, prednisolone-21 (beta-D-glucuronide), prednisolone metasulphobenzoate, prednisolone steaglate, prednisolone tebutate, prednisolone tetrahydrophthalate), prednisones, prednivals, prednylidenes, rimexolones, tixocortols, triamcinolones (e.g. triamcinolone acetonide, triamcinolone benetonide, triamcinolone hexacetonide, triamcinolone acetonide 21-palmitate, triamcinolone diacetate). These glucocorticoids and the salts thereof are discussed in detail, for example, in Remington's Pharmaceutical Sciences, A. Osol, ed., Mack Pub. Co., Easton, Pa. (16th ed. 1980).

[0802] In some examples, the glucocorticoid is selected from among cortisones, dexamethasones, hydrocortisones, methylprednisolones, prednisolones and prednisones. In a particular example, the glucocorticoid is dexamethasone.

[0803] The corticosteroid is provided in a therapeutically effective dose. A therapeutically effective concentration can be determined empirically by testing in known in vitro or in vivo (e.g. animal model) systems. For example, the amount of a selected corticosteroid to be administered to ameliorate the adverse effects can be determined by standard clinical techniques. In addition, animal models can be employed to help identify optimal dosage ranges. The precise dosage, which can be determined empirically, can depend on the particular therapeutic preparation, the regimen and dosing schedule, the route of administration and the seriousness of the disease.

[0804] The concentration of a selected therapeutic agent in the composition depends on absorption, inactivation and excretion rates, the physicochemical characteristics, the dosage schedule, and amount administered as well as other factors known to those of skill in the art. For example, it is understood that the precise dosage and duration of treatment is a function of the disease or condition, the tissue being treated, the patient or subject and the anti-hyaluronan agent, including amount and dosage regime. The dose of the corticosteroid also can vary depending on the age and health of the patient, the polymer-conjugated hyaluronan-degrading enzyme dosing (e.g. PEGylated hyaluronan degrading enzyme dosing), potency of the corticosteroid, and the route of administration. For example, it is to be noted that concentrations and dosage values will vary with the therapeutic dose and dosage regimen of the hyaluronan degrading enzyme. Additionally, the corticosteroid can be administered daily, weekly, or monthly or over longer periods of time in order to achieve the desired results. The particular dosage volume can vary and is dependent on the dosage regime, frequency of administration and the desired rate of administration. It is to be noted that concentrations and dosage values can also vary with the age of the individual treated.

[0805] The precise dosage and duration of treatment can be determined empirically using known testing protocols or by extrapolation from in vivo or in vitro test data. It is to be further understood that for any particular subject, specific dosage regimens should be adjusted over time according to the individual need and the professional judgment of the person administering or supervising the administration of the formulations, and that the concentration ranges set forth herein are exemplary only and are not intended to limit the scope thereof. Generally, dosage regimens are chosen to limit toxicity, and herein are chosen to ameliorate adverse side effects. It should be noted that the attending physician would know how to and when to terminate, interrupt or adjust therapy to lower dosage due to toxicity, or bone marrow, liver or kidney or other tissue dysfunctions. Conversely, the attending physician would also know how to and when to adjust treatment to higher levels if the clinical response is not adequate (precluding toxic side effects). Administration of a therapeutic agent should not exceed the maximum dosage levels established by the United States Food and Drug Administration or published in the Physician's Desk Reference.

[0806] Generally, the dose of corticosteroid administered is dependent upon the specific corticosteroid, as a difference in potency exists between different corticosteroids (see Table 4 below). The corticosteroid, or glucocorticoid, for example dexamethasone, can be given orally (tablets, liquid or liquid concentrate) PO, intravenously (IV) or intramuscularly. The corticosteroid is typically administered as a bolus, but many be administered over a period of time, as long as the dose is effective to ameliorate one or more side effects associated with administration of the anti-hyaluronan agent, for example, a PEGylated hyaluronidase.

TABLE 4
Glucocorticoid administration

| Glucocorticoid (route) | Equivalent Potency (mg) |
|---|---|
| Hydrocortisone (IV or PO) | 20 |
| Prednisone | 5 |
| Prednisolone (IV or PO) | 5 |
| Methylprednisolone sodium succinate (IV) | 4 |
| Dexamethasone (IV or PO) | 0.5-0.75 |

[0807] The corticosteroid can be administered in any amount that is effective to ameliorate one or more side effects associated with administration of the hyaluronan degrading enzyme. Thus, the corticosteroid, e.g., glucocorticoid, can be administered, for example, at an amount between at or about 0.1 and 100 mgs, per dose, 0.1 to 80 mgs, 0.1 to 60 mgs, 0.1 to 40 mgs, 0.1 to 30 mgs, 0.1 to 20 mgs, 0.1 to 15 mgs, 0.1 to 10 mgs, 0.1 to 5 mgs, 0.2 to 40 mgs, 0.2 to 30 mgs, 0.2 to 20 mgs, 0.2 to 15 mgs, 0.2 to 10 mgs, 0.2 to 5 mgs, 0.4 to 40 mgs, 0.4 to 30 mgs, 0.4 to 20 mgs, 0.4 to 15 mgs, 0.4 to 10 mgs, 0.4 to 5 mgs, 0.4 to 4 mgs, 1 to 20 mgs, 1 to 15 mgs or 1 to 10 mgs, to a 70 kg adult human subject. Typically, the corticosteroid, such as a glucocorticoid is administered at an amount between at or about 0.4 and 20 mgs, for example, at or about 0.4 mgs, 0.5 mgs, 0.6 mgs, 0.7 mgs, 0.75 mgs, 0.8 mgs, 0.9 mgs, 1 mg, 2 mgs, 3 mgs, 4 mgs, 5 mgs, 6 mgs, 7 mgs, 8 mgs, 9 mgs, 10 mgs, 11 mgs, 12 mgs, 13 mgs, 14 mgs, 15 mgs, 16 mgs, 17 mgs, 18 mgs, 19 mgs or 20 mgs per dose, to an average adult human subject.

[0808] The corticosteroid can be administered, for example, at a dosage of at or about 0.001 mg/kg (of the subject), 0.002 mg/kg, 0.003 mg/kg, 0.004 mg/kg, 0.005 mg/kg, 0.006 mg/kg, 0.007 mg/kg, 0.008 mg/kg, 0.009 mg/kg, 0.01 mg/kg, 0.015 mg/kg, 0.02 mg/kg, 0.025 mg/kg, 0.03 mg/kg, 0.035 mg/kg, 0.04 mg/kg, 0.045 mg/kg, 0.05 mg/kg, 0.055 mg/kg, 0.06 mg/kg, 0.065 mg/kg, 0.07 mg/kg, 0.075 mg/kg, 0.08 mg/kg, 0.085 mg/kg, 0.09 mg/kg, 0.095 mg/kg, 0.1 mg/kg, 0.15 mg/kg, 0.2 mg/kg, 0.25 mg/kg, 0.30 mg/kg, 0.35 mg/kg, 0.40 mg/kg, 0.45 mg/kg, 0.50 mg/kg, 0.55 mg/kg, 0.60 mg/kg, 0.65 mg/kg, 0.70 mg/kg, 0.75 mg/kg, 0.80 mg/kg, 0.85 mg/kg, 0.90 mg/kg, 0.95 mg/kg, 1 mg/kg, 1.05 mg/kg, 1.1 mg/kg, 1.15 mg/kg, 1.20 mg/kg, 1.25 mg/kg, 1.3 mg/kg, 1.35 mg/kg or 1.4 mg/kg, to an average adult human subject, typically weighing about 70 kg to 75 kg.

[0809] The dosage administered can vary as long as administration of the corticosteroid ameliorates one or more adverse side effects associated with administration of the hyaluronan-degrading enzyme. In one example, the dosage of glucocorticoid, for example, dexamethasone, is adminstered in successively lower dosages per treatment cycle. Hence, in such treatment regimes, the dose of corticosteroid is tapered. For example, dexamethasone is administered prior to administration of an hyaluronan-degrading enzyme, at an initial dose of 4 mg, and upon each successive administration of the hyaluronan-degrading enzyme, the dexamethasone dose is lowered, such that the dose is 3 mg for the next administration of the hyaluronan-degrading enzyme, e.g. PEGylated hyaluronidase, then 2 mg per administration of anti-hyaluronan agent, e.g. PEGylated hyaluronidase, and then 1 mg per administration of anti-hyaluronan agent, e.g. PEGylated hyaluronidase. Any dose is contemplated as long as the dose of the corticosteroid is effective to reduce one or more side effects associated with administration of the hyaluronan-degrading enzyme, e.g. a PEGylated hyaluronidase. Time of administration can vary as long as administration of the corticosteroid ameliorates one or more adverse side effects associated with administration of the hyaluronan-degrading enzyme, such as a PEGylated hyaluronidase. The corticosteroid can be administered sequentially, intermittently, at the same time or in the same composition as hyaluronan-degrading enzyme, e.g. PEGylated hyaluronan degrading enzyme. For example, the corticosteroid can be administered before, during, simultaneously with, or after administration of the hyaluronan-degrading enzyme, e.g. PEGylated hyaluronidase. In another example, the corticosteroid and hyaluronan-degrading enzyme, e.g. PEGylated hyaluronidase are administered intermittently. Generally, the corticosteroid is administered prior to administration of the hyaluronan-degrading enzyme, e.g. PEGylated hyaluronidase. For example, the corticosteroid, e.g., glucocorticoid, such as dexamethasone, can be administered at or about 0.5 minutes, 1 minute, 2 minutes, 3 minutes, 4 minutes, 5 minutes, 6 minutes, 7 minutes, 8 minutes, 9 minutes, 10 minutes, 15 minutes, 20 minutes, 25 minutes, 30 minutes, 45 minutes, 1 hour, 2 hours, 3 hours, 4 hours, 5 hours, 6 hours, 7 hours, 8 hours, 9 hours, 10 hours, 11 hours, 12 hours, 18 hours, 24 hours, 36 hours or more prior to administration of the anti-hyaluronan agent, for example a PEGylated hyaluronan degrading enzyme.

[0810] In some examples, the corticosteroid is administered at the same time as administration of the hyaluronan-degrading enzyme, for example a PEGylated hyaluronan degrading enzyme. In this example, the corticosteroid can be administered together with, or separately from, the hyaluronan-degrading enzyme, e.g. a PEGylated hyaluronidase. Typically, the corticosteroid is administered separately from the hyaluronan-degrading enzyme, for example a PEGylated hyaluronan degrading enzyme. In other examples, the corticosteroid is administered at or about 0.5 minutes, 1 minute, 2 minutes, 3 minutes, 4 minutes, 5 minutes, 6 minutes, 7 minutes, 8 minutes, 9 minutes, 10 minutes, 15 minutes, 20 minutes, 25 minutes, 30 minutes, 45 minutes, 1 hour, 2 hours, 3 hours, 4 hours, 5 hours, 6 hours, 7 hours, 8 hours, 9 hours, 10 hours, 11 hours, 12 hours, 18 hours, 24 hours, 36 hours or more after administration of the hyaluronan-degrading enzyme, for example a PEGylated hyaluronan degrading enzyme.

[0811] In one example, the corticosteroid is administered prior to administration of a hyaluronan-degrading enzyme, for example a PEGylated hyaluronidase. For example, the corticosteroid, e.g., glucocorticoid, for example, dexamethasone, is administered 1 hour prior to the administration of the hyaluronan-degrading enzyme, e.g. a PEGylated hyaluronidase. In another example, the corticosteroid is administered 5 minutes before the administration of the hyaluronan-degrading enzyme, e.g. a PEGylated hyaluronan degrading enzyme. In another example, the corticosteroid is administered both prior to and after the administration of a hyaluronan-degrading enzyme, e.g. a PEGylated hyaluronidase. In this example, the corticosteroid, such as dexamethasone, is administered one to five minutes immediately before administration of the hyaluronan-degrading enzyme, e.g. a PEGylated hyaluronan degrading enzyme and eight hours after administration of the anti-hyaluronan agent, e.g. a PEGylated hyaluronan degrading enzyme. In another example, a corticosteroid, such as dexamethasone, is administered one hour before administration of the hyaluronan-degrading enzyme, e.g. a PEGylated hyaluronan degrading enzyme and eight to twelve hours after administration of the anti-hyaluronan agent, e.g. a PEGylated hyaluronan degrading enzyme.

[0812] Any dosing regimen is contemplated as long as the time of dosing of the corticosteroid ameliorates the one or more side effects associated with administration of the hyaluronan-degrading enzyme, for example a PEGylated hyaluronidase. In addition, the dose or dosing regimen of corticosteroid is one that does not interfere or reduce the therapeutic effect of the hyaluronan-degrading enzyme or other agent in the compositions and combinations provided herein, including in treating a cancer or solid tumor.

[0813] b. Anti-Cancer Agents and Other Treatments

[0814] The hyaluronan degrading enzyme, such as a polymer-conjugated soluble hyaluronidase, and the combination therapy exemplified herein can be used alone or in further combination with other anti-cancer agents. The anti-cancer agent(s) or treatment(s) can be, but are not limited to, surgery, radiation, drugs, chemotherapeutics, polypeptides, antibodies, peptides, checkpoint inhibitors, small molecules, gene therapy vectors, viruses or DNA.

[0815] Exemplary anti-cancer agents that can be administered after, coincident with or before administration of the soluble hyaluronidase combination therapy herein, or with the soluble hyaluronidase and tumor-targeted taxane combination, or with the soluble hyaluronidase, tumor-targeted taxane and nucleoside analog combination, include, but are not limited to Acivicins; Avicin; Aclarubicins; Acodazoles; Acronines; Adozelesins; Aldesleukins; Alemtuzumabs; Alitretinoins (9-Cis-Retinoic Acids); Allopurinols; Altretamines; Alvocidibs; Ambazones; Ambomycins; Ametantrones; Amifostines; Aminoglutethimides; Amsacrines; Anastrozoles; Anaxirones; Ancitabines; Anthramycins; Apaziquones; Argimesnas; Arsenic Trioxides; Asparaginases; Asperlins; Atrimustines; Azacitidines; Azetepas; Azotomycins; Banoxantrones; Batabulins; Batimastats; BCG Live; Benaxibines; Bendamustines; Benzodepas; Bexarotenes; Bevacizumab; Bicalutamides; Bietaserpines; Biricodars; Bisantrenes; Bisnafide Dimesylates; Bizelesins; Bleomycins; Bortezomibs; Brequinars; Bropirimines; Budotitanes; Busulfans; Cactinomycins; Calusterones; Canertinibs; Capecitabines; Caracemides; Carbetimers; Carboplatins; Carboquones; Carmofurs; Carmustines with Polifeprosans; Carmustines; Carubicins; Carzelesins; Cedefingols; Celecoxibs; Cemadotins; Chlorambucils; Cioteronels; Cirolemycins; Cisplatins; Cladribines; Clanfenurs; Clofarabines; Crisnatols; Cyclophosphamides; Cytarabine liposomals; Cytarabines; Dacarbazines; Dactinomycins; Darbepoetin Alfas; Daunorubicin liposomals; Daunorubicins/Daunomycins; Daunorubicins; Decitabines; Denileukin Diftitoxes; Dexniguldipines; Dexonnaplatins; Dexrazoxanes; Dezaguanines; Diaziquones; Dibrospidiums; Dienogests; Dinalins; Disermolides; Docetaxels; Dofequidars; Doxifluridines; Doxorubicin liposomals; Doxorubicin HCL; Doxorubicin HCL liposome injection; Doxorubicins; Droloxifenes; Dromostanolone Propionates; Duazomycins; Ecomustines; Edatrexates; Edotecarins; Eflornithines; Elacridars; Elinafides; Elliott's B Solutions; Elsamitrucins; Emitefurs; Enloplatins; Enpromates; Enzastaurins; Epipropidines; Epirubicins; Epoetin alfas; Eptaloprosts; Erbulozoles; Esorubicins; Estramustines; Etanidazoles; Etoglucids; Etoposide phosphates; Etoposide VP-16s; Etoposides; Etoprines; Exemestanes; Exisulinds; Fadrozoles; Fazarabines; Fenretinides; Filgrastims; Floxuridines; Fludarabines; Fluorouracils; 5-fluorouracils; Fluoxymesterones; Flurocitabines; Fosquidones; Fostriecins; Fostriecins; Fotretamines; Fulvestrants; Galarubicins; Galocitabines; Gemcitabines; Gemtuzumabs/Ozogamicins; Geroquinols; Gimatecans; Gimeracils; Gloxazones; Glufosfamides; Goserelin acetates; Hydroxyureas; Ibritumomabs/Tiuxetans; Idarubicins; Ifosfamides; Ilmofosines; Ilomastats; Imatinib mesylates; Imexons; Improsulfans; Indisulams; Inproquones; Interferon alfa-2as; Interferon alfa-2bs; Interferon Alfas; Interferon Betas; Interferon Gammas; Interferons; Interleukin-2s and other Interleukins (including recombinant Interleukins); Intoplicines; Iobenguanes [131-I]; Iproplatins; Irinotecans; Irsogladines; Ixabepilones; Ketotrexates; L-Alanosines; Lanreotides; Lapatinibs; Ledoxantrones; Letrozoles; Leucovorins; Leuprolides; Leuprorelins (Leuprorelides); Levamisoles; Lexacalcitols; Liarozoles; Lobaplatins; Lometrexols; Lomustines/CCNUs; Lomustines; Lonafarnibs; Losoxantrones; Lurtotecans; Mafosfamides; Mannosulfans; Marimastats; Masoprocols; Maytansines; Mechlorethamines; Mechlorethamines/Nitrogen mustards; Megestrol acetates; Megestrols; Melengestrols; Melphalans; Melphalans1L-PAMs; Menogarils; Mepitiostanes; Mercaptopurines; 6-Mercaptopurine; Mesnas; Metesinds; Methotrexates; Methoxsalens; Metomidates; Metoprines; Meturedepas; Miboplatins; Miproxifenes; Misonidazoles; Mitindomides; Mitocarcins; Mitocromins; Mitoflaxones; Mitogillins; Mitoguazones; Mitomalcins; Mitomycin Cs; Mitomycins; Mitonafides; Mitoquidones; Mitospers; Mitotanes; Mitoxantrones; Mitozolomides; Mivobulins; Mizoribines; Mofarotenes; Mopidamols; Mubritinibs; Mycophenolic Acids; Nandrolone Phenpropionates; Nedaplatins; Nelzarabines; Nemorubicins; Nitracrines; Nocodazoles; Nofetumomabs; Nogalamycins; Nolatrexeds; Nortopixantrones; Octreotides; Oprelvekins; Ormaplatins; Ortataxels; Oteracils; Oxaliplatins; Oxisurans; Oxophenarsines; Paclitaxels; Pamidronates; Patubilones; Pegademases; Pegaspargases; Pegfilgrastims; Peldesines; Peliomycins; Pelitrexols; Pemetrexeds; Pentamustines; Pentostatins; Peplomycins; Perfosfamides; Perifosines; Picoplatins; Pinafides; Pipobromans; Piposulfans; Pirfenidones; Piroxantrones; Pixantrones; Plevitrexeds; Plicamycid Mithramycins; Plicamycins; Plomestanes; Plomestanes; Porfimer sodiums; Porfimers; Porfiromycins; Prednimustines; Procarbazines; Propamidines; Prospidiums; Pumitepas; Puromycins; Pyrazofurins; Quinacrines; Ranimustines; Rasburicases; Riboprines; Ritrosulfans; Rituximabs; Rogletimides; Roquinimexs; Rufocromomycins; Sabarubicins; Safingols; Sargramostims; Satraplatins; Sebriplatins; Semustines; Simtrazenes; Sizofirans; Sobuzoxanes; Sorafenibs; Sparfosates; Sparfosic Acids; Sparsomycins; Spirogermaniums; Spiromustines; Spiroplatins; Spiroplatins; Squalamines; Streptonigrins; Streptovarycins; Streptozocins; Sufosfamides; Sulofenurs; Sunitinib Malate; 6-thioguanine (6-TG); Tacedinalines; Talcs; Talisomycins; Tallimustines; Tamoxifens; Tariquidars; Tauromustines; Tecogalans; Tegafurs; Teloxantrones; Temoporfins; Temozolomides; Teniposides/VM-26s; Teniposides; Teroxirones; Testolactones; Thiamiprines; Thioguanines; Thiotepas; Tiamiprines; Tiazofurins; Tilomisoles; Tilorones; Timcodars; Timonacics; Tirapazamines; Topixantrones; Topotecans; Toremifenes; Tositumomabs; Trabectedins (Ecteinascidin 743); Trastuzumabs; Trestolones; Tretinoins/ATRA; Triciribines; Trilostanes; Trimetrexates; Triplatin Tetranitrates; Triptorelins; Trofosfamides; Tubulozoles; Ubenimexs; Uracil Mustards; Uredepas; Valrubicins; Valspodars; Vapreotides; Verteporfins; Vinblastines; Vincristines; Vindesines; Vinepidines; Vinflunines; Vinformides; Vinglycinates; Vinleucinols; Vinleurosines; Vinorelbines; Vinrosidines; Vintriptols; Vinzolidines; Vorozoles; Xanthomycin As (Guamecyclines); Zeniplatins; Zilascorbs [2-H]; Zinostatins; Zoledronate; Zorubicins; and Zosuquidars, for example: Aldesleukins (e.g. PROLEUKIN®); Alemtuzumabs (e.g. CAMPATH®); Alitretinoins (e.g. PANRETIN®); Allopurinols (e.g. ZYLOPRIM®); Altretamines (e.g. HEXALEN®); Amifostines (e.g. ETHYOL®); Anastrozoles (e.g. ARIMIDEX®); Arsenic Trioxides (e.g. TRISENOX®); Asparaginases (e.g. ELSPAR®); BCG Live (e.g. TICE® BCG); Bexarotenes (e.g. TARGRETIN®); Bevacizumab (AVASTIN®); Bleomycins (e.g. BLENOXANE®); Busulfan intravenous (e.g. BUSULFEX®); Busulfan orals (e.g. MYLERAN®); Calusterones (e.g. METHOSARB®); Capecitabines (e.g. XELODA®); Carboplatins (e.g. PARAPLATIN®); Carmustines (e.g. BCNU®, BiCNU®); Carmustines with Polifeprosans (e.g. GLIADEL® Wafer); Celecoxibs (e.g. CELEBREX®); Chlorambucils (e.g. LEUKERAN®); Cisplatins (e.g. PLATINOL®); Cladribines (e.g. LEUSTATIN®, 2-CdA®); Cyclophosphamides (e.g. CYTOXAN®, NEOSAR®); Cytarabines (e.g. CYTOSAR-U®); Cytarabine liposomals (e.g. DepoCyt®); Dacarbazines (e.g. DTIC-Dome): Dactinomycins (e.g. COSMEGEN®); Darbepoetin Alfas (e.g. ARANESP®); Daunorubicin liposomals (e.g. DANUOXOME®); Daunorubicins/Daunomycins (e.g. CERUBIDINE®); Denileukin Diftitoxes (e.g. ONTAK®); Dexrazoxanes (e.g. ZINECARD®); Docetaxels (e.g. TAXOTERE®); Doxorubicins (e.g. ADRIAMYCIN®, RUBEX®); Doxorubicin liposomals, including Doxorubicin HCL liposome injections (e.g. DOXIL®); Dromostanolone propionates (e.g. DROMOSTANOLONE® and MASTERONE® Injection); Elliott's B Solutions (e.g. Elliott's B Solution®); Epirubicins (e.g. ELLENCE®); Epoetin alfas (e.g. EPOGEN®); Estramustines (e.g. EMCYT®); Etoposide phosphates (e.g. ETOPOPHOS®); Etoposide VP-16s (e.g. VEPESID®); Exemestanes (e.g. AROMASIN®); Filgrastims (e.g. NEUPOGEN®); Floxuridines (e.g. FUDR®); Fludarabines (e.g. FLUDARA®); Fluorouracils incl. 5-FUs (e.g. ADRUCIL®); Fulvestrants (e.g. FASLODEX®); Gemcitabines (e.g. GEMZAR®); Gemtuzumabs/Ozogamicins (e.g. MYLOTARG®); Goserelin acetates (e.g. ZOLADEX®); Hydroxyureas (e.g. HYDREA®); Ibritumomabs/Tiuxetans (e.g. ZEVALIN®); Idarubicins (e.g. IDAMYCIN®); Ifosfamides (e.g. IFEX®); Imatinib mesylates (e.g. GLEEVEC®); Interferon alfa-2as (e.g. ROFERON-A®); Interferon alfa-2bs (e.g. INTRON A®); Irinotecans (e.g. CAMPTOSAR®); Letrozoles (e.g. FEMARA®); Leucovorins (e.g. WELLCOVORIN®, LEUCOVORIN®); Levamisoles (e.g. ERGAMISOL®); Lomustines/CCNUs (e.g. CeeBU®); Mechlorethamines/Nitrogen mustards (e.g. MUSTARGEN®); Megestrol acetates (e.g. MEGACE®); Melphalans/L-PAMs (e.g. ALKERAN®); Mercaptopurine, including 6-mercaptopurines (6-MPs; e.g. PURINETHOL®); Mesnas (e.g. MESNEX®); Methotrexates; Methoxsalens (e.g. UVADEX®); Mitomycin Cs (e.g. MUTAMYCIN®, MITOZYTREX®); Mitotanes (e.g. LYSODREN®); Mitoxantrones (e.g. NOVANTRONE®); Nandrolone Phenpropionates (e.g. DURABOLIN-50®); Nofetumomabs (e.g. VERLUMA®); Oprelvekins (e.g. NEUMEGA®); Oxaliplatins (e.g. ELOXATIN®); Paclitaxels (e.g. PAXENE®, TAXOL®); Pamidronates (e.g. AREDIA®); Pegademases (e.g. ADAGEN®); Pegaspargases (e.g. ONCASPAR®); Pegfilgrastims (e.g. NEULASTA®); Pentostatins (e.g. NIPENT®); Pipobromans (e.g. VERCYTE®); Plicamycin/Mithramycins (e.g. MITHRACIN®); Porfimer sodiums (e.g. PHOTOFRIN®); Procarbazines (e.g. MATULANE®); Quinacrines (e.g. ATABRINE®); Rasburicases (e.g. ELITEK®); Rituximabs (e.g. RITUXAN®); Sargramostims (e.g. PROKINE®); Streptozocins (e.g. ZANOSAR®); Sunitinib Malates (e.g. SUTENT®); Talcs (e.g. SCLEROSOL®); Tamoxifens (e.g. NOLVADEX®); Temozolomides (e.g. TEMODAR®); Teniposides/VM-26s (e.g. VUMON®); Testolactones (e.g. TESLAC®); Thioguanines including, 6-thioguanine (6-TG); Thiotepas (e.g. THIOPLEX®); Topotecans (e.g. HYCAMTIN®); Toremifenes (e.g. FARESTON®); Tositumomabs (e.g. BEXXAR®); Trastuzumabs (e.g. HERCEPTIN®); Tretinoins/ATRA (e.g. VESANOID®); Uracil Mustards; Valrubicins (e.g. VALSTAR®); Vinblastines (e.g. VELBAN®); Vincristines (e.g. ONCOVIN®); Vinorelbines (e.g. NAVELBINE®); and Zoledronates (e.g. ZOMETA®).

[0816] Exemplary checkpoint inhibitors that can be administered after, coincident with or before administration of a hyaluronan-degrading enzyme or a combination therapy herein, include, but are not limited to, anti-CTLA4 agents, anti-PF-1 agents and others, exemplary of which are the following:

Exemplary inhibitory immune checkpoint target proteins and inhibitors

| | | Antibody/fusion | |
|---|---|---|---|
| Target | Target Function | protein | Synonyms and Code Names |
| CTLA4 | Inhibitory receptor | Ipilimumab | (MDX-CTLA-4; BMS-734016; MDX-010) |
| | | Tremelimumab | (ticilimumab; CP-675,206) |
| PD-1 | Inhibitory receptor | MK-3475 | (Pembrolizumab; Lambrolizumab; SCH |
| | | AMP-224 | 900475) |
| | | Nivolumab | (anti-PD-1 fusion protein AMP-224) |
| | | Pidilizumab | (BMS-936558; MDX-1106; ONO-4538) |
| | | | (CT-011) |
| PD-L1 | Ligand for PD-1 | MDX-1105 | (RG7446) |
| | | BMS-936559 | |
| | | MED14736 | |
| | | MPDL33280A | |
| LAG3 | Inhibitory receptor | IMP321 | ImmuFact |
| B7-H3 | Inhibitory ligand | MGA271 | |
| B7-H4 | Inhibitory ligand | | |
| TIM3 | Inhibitory receptor | | |
| CD25 | inhibitory receptor | | |
| | subunit | | |
| CD137 | stimulatory | | |
| | receptor | | |
| OX40 | stimulatory | | |
| | receptor | | |
| 4-1BB | co-stimulatory | Aptamer ligand | |
| | receptor | | |
| IDO | immunosuppressive | | |
| | enzyme | | |

[0817] Combination therapies of anti-hyaluronan agents, such as polymer-conjugated hyaluronan-degrading enzymes, such as polymer-conjugated soluble hyaluronidases, and other forms thereof, such as vesicles containing an hyaluronan-degrading enzyme and vectors encoding it, which include an immune checkpoint inhibitor, such as inhibitors of immune checkpoint proteins, such as anti-CTLA4 and anti-PD-1 agents, can be used in the treatment of cancers in subjects selected for treatment with an anti-hyaluronan agent according to the methods provided herein. In particular, the combination therapies of a polymer-conjugated hyaluronan-degrading enzyme, for example, a hyaluronidase, such as PEGPH20, alone or in conjunction with other agents, e.g, a tumor-targeted taxane and/or a nucleoside analog, and immune checkpoint inhibitors, such as anti-CTLA4 and anti-PD-1 agents, can be used in the treatment of cancers for subjects selected for treatment with an anti-hyaluronan agent according to the methods provided herein. For purposes of embodiments herein, reference to a hyaluronan-degrading enzyme (e.g., a soluble hyaluronidase, such as

[0818] PH20), includes polymer-conjugated hyaluronan-degrading enzymes (e.g., polymer-conjugated soluble hyaluronidase polypeptides, such as PEGPH20). Examples of such cancers include solid tumor cancers, such as but not limited to, pancreatic cancer, breast cancer, prostate cancer, gastric cancer, colon cancer, ovarian cancer, head and neck cancer, lung cancer and others. The therapy can further include a further immune targeting agent, cytotoxic chemotherapeutic drug, radiotherapy, or surgical treatment.

### I. EXAMPLES

[0819] The following examples are included for illustrative purposes only and are not intended to limit the scope of the invention.

### Example 1

### Preparation of Soluble PI120 Polypeptides

### Soluble PI120 Polypeptide (rHuPH20) Expressing Cell Lines

[0820] A. Generation of an Initial Soluble rHuPH20-Expressing Cell Line

[0821] Chinese Hamster Ovary (CHO) cells were transfected with the HZ24 plasmid (set forth in SEQ ID NO:52). The HZ24 plasmid vector for expression of soluble rHuPH20 contains a pCI vector backbone (Promega), DNA encoding amino acids 1-482 of human PH20 hyaluronidase (SEQ ID NO:49), an internal ribosomal entry site (IBES) from the ECMV virus (Clontech), and the mouse dihydrofolate reductase (DHFR) gene. The pCI vector backbone also includes DNA encoding the Beta-lactamase resistance gene (AmpR), an f1 origin of replication, a Cytomegalovirus immediate-early enhancer/promoter region (CMV), a chimeric intron, and an SV40 late polyadenylation signal (SV40). The DNA encoding the soluble rHuPH20 construct contains an NheI site and a Kozak consensus sequence prior to the DNA encoding the methionine at amino acid position 1 of the native 35 amino acid signal sequence of human PH20, and a stop codon following the DNA encoding the tyrosine corresponding to amino acid position 482 of the human PH20 hyaluronidase set forth in SEQ ID NO:3, followed by a BamHI restriction site. The construct pCI-PH20-IRES-DHFR-SV40pa (HZ24), therefore, results in a single mRNA species driven by the CMV promoter that encodes amino acids 1-482 of human PH20 (set forth in SEQ ID NO:3) and amino acids 1-186 of mouse dihydrofolate reductase (set forth in SEQ ID NO:53), separated by the internal ribosomal entry site (IRES).

[0822] Non-transfected CHO cells growing in GIBCO Modified CD-CHO media for DHFR(−) cells, supplemented with 4 mM Glutamine and 18 ml/L Pluronic F68/L (Gibco), were seeded at 0.5×10⁶ cells/ml in a shaker flask in preparation for transfection. Cells were grown at 37° C. in 5% CO₂ in a humidified incubator, shaking at 120 rpm. Exponentially growing non-transfected CHO cells were tested for viability prior to transfection.

[0823] Sixty million viable cells of the non-transfected CHO cell culture were pelleted and resuspended to a density of 2×10⁷ cells in 0.7 mL of 2× transfection buffer (2×HeBS: 40 mM Hepes, pH 7.0, 274 mM NaCl, 10 mM KCl, 1.4 mM Na₂HPO₄, 12 mM dextrose). To each aliquot of resuspended cells, 0.09 mL (250 μg) of the linear HZ24 plasmid (linearized by overnight digestion with Cla I (New England Biolabs) was added, and the cell/DNA solutions were transferred into 0.4 cm gap BTX (Gentronics) electroporation cuvettes at room temperature. A negative control electroporation was performed with no plasmid DNA mixed with the cells. The cell/plasmid mixes were electroporated with a capacitor discharge of 330 V and 960 μF or at 350 V and 960 μF. The cells were removed from the cuvettes after electroporation and transferred into 5 mL of Modified CD-CHO media for DHFR(−) cells, supplemented with 4 mM Glutamine and 18 ml/L Pluronic F68/L (Gibco), and allowed to grow in a well of a 6-well tissue culture plate without selection for 2 days at 37° C. in 5% CO₂ in a humidified incubator.

[0824] Two days post-electroporation, 0.5 mL of tissue culture media was removed from each well and tested for the presence of hyaluronidase activity using the microturbidity assay described in Example 4. Cells expressing the highest levels of hyaluronidase activity were collected from the tissue culture well, counted and diluted to 1×10⁴ to 2×10⁴ viable cells per mL. A 0.1 mL aliquot of the cell suspension was transferred to each well of five, 96-well round bottom tissue culture plates. One hundred microliters of CD-CHO media (GIBCO) containing 4 mM GlutaMAX™-1 supplement (GIBCO™, Invitrogen Corporation) and without hypoxanthine and thymidine supplements were added to the wells containing cells (final volume 0.2 mL).

[0825] Ten clones were identified from the 5 plates grown without methotrexate. Six of these HZ24 clones were expanded in culture and transferred into shaker flasks as single cell suspensions. Clones 3D3, 3E5, 2G8, 2D9, 1E11, and 4D10 were plated into 96-well round bottom tissue culture plates using a two-dimensional infinite dilution strategy in which cells were diluted 1:2 down the plate, and 1:3 across the plate, starting at 5000 cells in the top left hand well. Diluted clones were grown in a background of 500 non-transfected DG44 CHO cells per well, to provide necessary growth factors for the initial days in culture. Ten plates were made per subclone, with 5 plates containing 50 nM methotrexate and 5 plates without methotrexate.

[0826] Clone 3D3 produced 24 visual subclones (13 from the no methotrexate treatment, and 11 from the 50 nM methotrexate treatment). Significant hyaluronidase activity was measured in the supernatants from 8 of the 24 subclones (>50 Units/mL), and these 8 subclones were expanded into T-25 tissue culture flasks. Clones isolated from the methotrexate treatment protocol were expanded in the presence of 50 nM methotrexate. Clone 3D35M was further expanded in 500 nM methotrexate in shaker flasks and gave rise to clones producing in excess of 1,000 Units/ml hyaluronidase activity (clone 3D35M; or Gen1 3D35M). A master cell bank (MCB) of the 3D35M cells was then prepared.

B. Generation of a Second Generation Cell Line Expressing Soluble rHuPH20

[0827] The Gen1 3D35M cell line described in Example 1A was adapted to higher methotrexate levels to produce generation 2 (Gen2) clones. 3D35M cells were seeded from established methotrexate-containing cultures into CD CHO medium containing 4 mM GlutaMAX-1™ and 1.0 μM methotrexate. The cells were adapted to a higher methotrexate level by growing and passaging them 9 times over a period of 46 days in a 37° C., 7% CO₂ humidified incubator. The amplified population of cells was cloned out by limiting dilution in 96-well tissue culture plates containing medium with 2.0 methotrexate. After approximately 4 weeks, clones were identified and clone 3E10B was selected for expansion. 3E10B cells were grown in CD CHO medium containing 4 mM GlutaMAX-1™ and 2.0 μM methotrexate for 20 passages. A master cell bank (MCB) of the 3E10B cell line was created and frozen and used for subsequent studies.

[0828] Amplification of the cell line continued by culturing 3E10B cells in CD CHO medium containing 4 mM GlutaMAX-1™ and 4.0 μM methotrexate. After the 12^{th} passage, cells were frozen in vials as a research cell bank (RCB). One vial of the RCB was thawed and cultured in medium containing 8.0 μM methotrexate. After 5 days, the methotrexate concentration in the medium was increased to 16.0 then 20.0 μM 18 days later. Cells from the 8^{th} passage in medium containing 20.0 μM methotrexate were cloned out by limiting dilution in 96-well tissue culture plates containing CD CHO medium containing 4 mM GlutaMAX-1™ and 20.0 μM methotrexate. Clones were identified 5-6 weeks later and clone 2B2 was selected for expansion in medium containing 20.0 μM methotrexate. After the 11th passage, 2B2 cells were frozen in vials as a research cell bank (RCB).

[0829] The resultant 2B2 cells are dihydrofolate reductase deficient (dhfr-) DG44 CHO cells that express soluble recombinant human PH20 (rHuPH20). The soluble PH20 is present in 2B2 cells at a copy number of approximately 206 copies/cell. Southern blot analysis of Spe I-, Xba I- and BamH I/Hind III-digested genomic 2B2 cell DNA using a rHuPH20-specific probe revealed the following restriction digest profile: one major hybridizing band of ˜7.7 kb and four minor hybridizing bands (˜13.9, ˜6.6, ˜5.7 and ˜4.6 kb) with DNA digested with Spe I; one major hybridizing band of ˜5.0 kb and two minor hybridizing bands (˜13.9 and ˜6.5 kb) with DNA digested with Xba I; and one single hybridizing band of ˜1.4 kb observed using 2B2 DNA digested with BamH I/Hind III. Sequence analysis of the mRNA transcript indicated that the derived cDNA (SEQ ID NO:56) was identical to the reference sequence (SEQ ID NO:49) except for one base pair difference at position 1131, which was observed to be a thymidine (T) instead of the expected cytosine (C). This is a silent mutation, with no effect on the amino acid sequence.

### Example 2

### Production and Purification of rHuPH20

[0830] A. Production of Gen2 Soluble rHuPH20 in 400 L Bioreactor Cell Culture

[0831] A vial of HZ24-2B2 cells (Example 1B) was thawed and expanded from shaker flasks through 36L spinner flasks in CD-CHO media (Invitrogen, Carlsbad, Calif.) supplemented with 20 μM methotrexate and GlutaMAX-1™ (Invitrogen). Briefly, a vial of cells was thawed in a 37° C. water bath, media was added and the cells were centrifuged. The cells were re-suspended in a 125 mL shake flask with 20 mL of fresh media and placed in a 37° C., 7% CO₂ incubator. The cells were expanded up to 40 mL in the 125 mL shake flask. When the cell density reached greater than 1.5×10⁶ cells/mL, the culture was expanded into a 125 mL spinner flask in a 100 mL culture volume. The flask was incubated at 37° C., 7% CO₂. When the cell density reached greater than 1.5×10⁶ cells/mL, the culture was expanded into a 250 mL spinner flask in 200 mL culture volume, and the flask was incubated at 37° C., 7% CO₂. When the cell density reached greater than 1.5×10⁶ cells/mL, the culture was expanded into a 1 L spinner flask in 800 mL culture volume and incubated at 37° C., 7% CO₂. When the cell density reached greater than 1.5×10⁶ cells/mL the culture was expanded into a 6 L spinner flask in 5000 mL culture volume and incubated at 37° C., 7% CO₂. When the cell density reached greater than 1.5×106 cells/mL the culture was expanded into a 36 L spinner flask in 32 L culture volume and incubated at 37° C., 7% CO₂.

[0832] A 400 L bioreactor was sterilized and 230 mL of CD-CHO media was added. Before use, the reactor was checked for contamination. Approximately 30 L cells were transferred from the 36L spinner flasks to the 400 L bioreactor (Braun) at an inoculation density of 4.0×10⁵ viable cells per ml and a total volume of 260 L. Parameters were temperature set point, 37° C.; Impeller Speed 40-55 RPM; Vessel Pressure: 3 psi; Air Sparge 0.5-1.5 L/Min.; Air Overlay: 3 L/min. The reactor was sampled daily for cell counts, pH verification, media analysis, protein production and retention. Also, during the run nutrient feeds were added. At 120 hrs (day 5), 10.4 L of Feed #1 Medium (4×CD-CHO+33 g/L Glucose+160 mL/L Glutamax-1™+83 mL/L Yeastolate+33 mg/L rHuInsulin) was added. At 168 hours (day 7), 10.8 L of Feed #2 (2×CD-CHO+33 g/L Glucose+80 mL/L Glutamax-1™+167 mL/L Yeastolate+0.92 g/L Sodium Butyrate) was added, and culture temperature was changed to 36.5° C. At 216 hours (day 9), 10.8 L of Feed #3 (lx CD-CHO+50 g/L Glucose+50 mL/L Glutamax-1™+250 mL/L Yeastolate+1.80 g/L Sodium Butyrate) was added, and culture temperature was changed to 36° C. At 264 hours (day 11), 10.8 L of Feed #4 (lx CD-CHO+33 g/L Glucose+33 mL/L Glutamax-1™+250 mL/L Yeastolate+0.92 g/L Sodium Butyrate) was added, and culture temperature was changed to 35.5° C. The addition of the feed media was observed to dramatically enhance the production of soluble rHuPH20 in the final stages of production. The reactor was harvested at 14 or 15 days or when the viability of the cells dropped below 40%. The process resulted in a final productivity of 17,000 Units per ml with a maximal cell density of 12 million cells/mL. At harvest, the culture was sampled for mycoplasma, bioburden, endotoxin and viral in vitro and in vivo, Transmission Electron Microscopy (TEM) and enzyme activity.

[0833] The culture was pumped by a peristaltic pump through four Millistak filtration system modules (Millipore) in parallel, each containing a layer of diatomaceous earth graded to 4-8 μm and a layer of diatomaceous earth graded to 1.4-1.1 μm, followed by a cellulose membrane, then through a second single Millistak filtration system (Millipore) containing a layer of diatomaceous earth graded to 0.4-0.11 μm and a layer of diatomaceous earth graded to <0.1 μm, followed by a cellulose membrane, and then through a 0.22 μm final filter into a sterile single use flexible bag with a 350 L capacity. The harvested cell culture fluid was supplemented with 10 mM EDTA and 10 mM Tris to a pH of 7.5. The culture was concentrated 10× with a tangential flow filtration (TFF) apparatus using four Sartoslice TFF 30 kDa molecular weight cutoff (MWCO) polyether sulfone (PES) filters (Sartorius), followed by a 10× buffer exchange with 10 mM Tris, 20 mM Na₂SO₄, pH 7.5 into a 0.22 μm final filter into a 50 L sterile storage bag.

[0834] The concentrated, diafiltered harvest was inactivated for virus. Prior to viral inactivation, a solution of 10% Triton X-100, 3% tri (n-butyl) phosphate (TNBP) was prepared. The concentrated, diafiltered harvest was exposed to 1% Triton X-100, 0.3% TNBP for 1 hour in a 36 L glass reaction vessel immediately prior to purification on the Q column.

B. Purification of Gen2 Soluble rHuPH20

[0835] A Q Sepharose (Pharmacia) ion exchange column (9 L resin, H=29 cm, D=20 cm) was prepared. Wash samples were collected for a determination of pH, conductivity and endotoxin (LAL) assay. The column was equilibrated with 5 column volumes of 10 mM Tris, 20 mM Na₂SO₄, pH 7.5. Following viral inactivation, the concentrated, diafiltered harvest (Example 2A) was loaded onto the Q column at a flow rate of 100 cm/hr. The column was washed with 5 column volumes of 10 mM Tris, 20 mM Na₂SO₄, pH 7.5 and 10 mM Hepes, 50 mM NaCl, pH 7.0. The protein was eluted with 10 mM Hepes, 400 mM NaCl, pH 7.0 into a 0.22 μm final filter into sterile bag. The eluate sample was tested for bioburden, protein concentration and hyaluronidase activity. A₂₈₀ absorbance readings were taken at the beginning and end of the exchange.

[0836] Phenyl-Sepharose (Pharmacia) hydrophobic interaction chromatography was next performed. A Phenyl-Sepharose (PS) column (19-21 L resin, H=29 cm, D=30 cm) was prepared. The wash was collected and sampled for pH, conductivity and endotoxin (LAL assay). The column was equilibrated with 5 column volumes of 5 mM potassium phosphate, 0.5 M ammonium sulfate, 0.1 mM CaCl₂, pH 7.0. The protein eluate from the Q sepharose column was supplemented with 2M ammonium sulfate, 1 M potassium phosphate and 1 M CaCl₂ stock solutions to yield final concentrations of 5 mM, 0.5 M and 0.1 mM, respectively. The protein was loaded onto the PS column at a flow rate of 100 cm/hr and the column flow thru collected. The column was washed with 5 mM potassium phosphate, 0.5 M ammonium sulfate and 0.1 mM CaCl₂ pH 7.0 at 100 cm/hr and the wash was added to the collected flow thru. Combined with the column wash, the flow through was passed through a 0.22 μm final filter into a sterile bag. The flow through was sampled for bioburden, protein concentration and enzyme activity.

[0837] An aminophenyl boronate column (ProMedics) was prepared. The wash was collected and sampled for pH, conductivity and endotoxin (LAL assay). The column was equilibrated with 5 column volumes of 5 mM potassium phosphate, 0.5 M ammonium sulfate. The PS flow through containing purified protein was loaded onto the aminophenyl boronate column at a flow rate of 100 cm/hr. The column was washed with 5 mM potassium phosphate, 0.5 M ammonium sulfate, pH 7.0. The column was washed with 20 mM bicine, 0.5 M ammonium sulfate, pH 9.0. The column was washed with 20 mM bicine, 100 mM sodium chloride, pH 9.0. The protein was eluted with 50 mM Hepes, 100 mM NaCl, pH 6.9 and passed through a sterile filter into a sterile bag. The eluted sample was tested for bioburden, protein concentration and enzyme activity.

[0838] The hydroxyapatite (HAP) column (Biorad) was prepared. The wash was collected and tested for pH, conductivity and endotoxin (LAL assay). The column was equilibrated with 5 mM potassium phosphate, 100 mM NaCl, 0.1 mM CaCl₂), pH 7.0. The aminophenyl boronate purified protein was supplemented to final concentrations of 5 mM potassium phosphate and 0.1 mM CaCl₂) and loaded onto the HAP column at a flow rate of 100 cm/hr. The column was washed with 5 mM potassium phosphate, pH 7, 100 mM NaCl, 0.1 mM CaCl₂). The column was next washed with 10 mM potassium phosphate, pH 7, 100 mM NaCl, 0.1 mM CaCl₂). The protein was eluted with 70 mM potassium phosphate, pH 7.0 and passed through a 0.22 μm sterile filter into a sterile bag. The eluted sample was tested for bioburden, protein concentration and enzyme activity.

[0839] The HAP purified protein was then passed through a viral removal filter. The sterilized Viosart filter (Sartorius) was first prepared by washing with 2 L of 70 mM potassium phosphate, pH 7.0. Before use, the filtered buffer was sampled for pH and conductivity. The HAP purified protein was pumped via a peristaltic pump through the 20 nM viral removal filter. The filtered protein in 70 mM potassium phosphate, pH 7.0 was passed through a 0.22 μm final filter into a sterile bag. The viral filtered sample was tested for protein concentration, enzyme activity, oligosaccharide, monosaccharide and sialic acid profiling. The sample also was tested for process related impurities.

### Example 3

### Preparation of PEGylated rHuPH20 (PEGPH20)

[0840] In this example, rHuPH20 was PEGylated by reaction of the enzyme with linear N-hydroxysuccinimidyl ester of methoxy poly(ethylene glycol) butanoic acid (mPEG-SBA-30K).

A. Preparation of mPEG-SBA-30K

[0841] In order to generate PEGPH20, rHuPH20 (which is approximately 60 KDa in size) was covalently conjugated to a linear N-hydroxysuccinimidyl ester of methoxy poly(ethylene glycol) butanoic acid (mPEG-SBA-30K), having an approximate molecular weight of 30 kDa. The structure of mPEG-SBA is shown below, where n 681.

[chemical structure]

[0842] Methods used to prepare the mPEG-SBA-30K that was used to PEGylate rHuPH20 are described, for example, in U.S. Pat. No. 5,672,662. Briefly, the mPEG-SBA-30K is made according to the following procedure:

[0843] A solution of ethyl malonate (2 equivalents) dissolved in dioxane is added drop by drop to sodium hydride (2 equivalents) and toluene under a nitrogen atmosphere. mPEG methane sulfonate (1 equivalent, MW 30 kDa, Shearwater) is dissolved in toluene and added to the above mixture. The resulting mixture is refluxed for approximately 18 hours. The reaction mixture is concentrated to half its original volume, extracted with 10% aqueous NaCl solution, extracted with 1% aqueous hydrochloric acid, and the aqueous extracts are combined. The collected aqueous layers are extracted with dichloromethane (3×) and the organic layer is dried with magnesium sulfate, filtered and evaporated to dryness. The resulting residue is dissolved in 1N sodium hydroxide containing sodium chloride and the mixture is stirred for 1 hour. The pH of the mixture is adjusted to approximately 3 by addition of 6N hydrochloric acid. The mixture is extracted with dichloromethane (2×).

[0844] The organic layer is dried over magnesium sulfate, filtered, concentrated, and poured into cold diethyl ether. The precipitate is collected by filtration and dried under vacuum. The resulting compound is dissolved in dioxane and refluxed for 8 hours and then concentrated to dryness. The resulting residue is dissolved in water and extracted with dichloromethane (2×), dried over magnesium sulfate, and the solution is concentrated by rotary evaporation and then poured into cold diethyl ether. The precipitate is collected by filtration and dried under vacuum. The resulting compound (1 equivalent) is dissolved in dichloromethane and N-hydroxysuccinimide (2.1 equivalents) is added. The solution is cooled to 0° C. and a solution of dicyclohexylcarbodiimide (2.1 equivalents) in dichloromethane is added dropwise. The solution is stirred at room temperature for approximately 18 hours. The reaction mixture is filtered, concentrated and precipitated in diethyl ether. The precipitate is collected by filtration and dried under vacuum to afford the powder mPEG-SBA-30K which is then frozen at ≤−15° C.

B. Conjugation of mPEG-SBA-30K to rHuPH20

[0845] To make the PEGPH20, mPEG-SBA-30K was coupled to the amino group(s) of rHuPH20 by covalent conjugation, providing stable amide bonds between rHuPH20 and mPEG, as shown below, where n 681.

[chemical structure]

[0846] Prior to conjugation, the rHuPH20 purified bulk protein made in Example 2B was concentrated to 10 mg/mL, using a 10 kDa polyethersulfone (PES) tangential flow filtration (TFF) cassettes (Sartorius) with a 0.2 m² filtration area, and buffer exchanged against 70 mM Potassium Phosphate at pH 7.2. The concentrated protein was then stored at 2-8° C. until use.

[0847] To conjugate the rHuPH20, the mPEG-SBA-30K (Nektar) was thawed at room temperature in the dark for not longer than 2 hours. Depending on the batch size, a sterile 3″ stir bar was placed into a 1 or 3 liter Erlenmeyer flask and buffer exchanged rHuPH20 protein was added. Five grams of dry mPEG-SBA-3 OK powder per gram of rHuPH20 (10:1 molar ratio of mPEG-SBA-30K: rHuPH20) was added to the flask under a vacuum hood and the mixture was mixed for 10 minutes or until the mPEG-SBA-30K was complete dissolved. The stir rate was set such that vortexing occurred without foaming.

[0848] The solution was then filtered under a class 100 hood by pumping the solution, via peristaltic pump, through a 0.22 μm polystyrene, cellulose acetate filter capsule (Corning 50 mL Tubetop filter) into a new 1 or 3 liter Erlenmeyer flask containing a sterile 3″ stir bar. The volume of the PEGPH20 reaction mixture was determined by mass (1 g/mL density) and the 0.22 μm filter used for filtration was examined in a post-use integrity test.

[0849] The mixture was then placed on a stir plate at 2-8° C. and mixed for 20±1 hours in the dark. The stir rate was again set such that vortexing occurred without foaming. The entire Erlenmeyer container was wrapped in foil to protect the solution from light. After mixing, the reaction was quenched by adding 1M glycine to a final concentration of 25 mM. Samples were removed from the container to test pH and conductivity. The pH and conductivity were then adjusted by adding to a solution of 5 mM Tris Base (5.65 L/L) and 5 mM Tris, 10 mM NaCl, pH 8.0 (13.35 L/L) to proceed with Q Sepharose purification.

[0850] A QFF Sepharose (GE Healthcare) ion exchange column (Height=21.5-24.0 cm, Diameter=20 cm) was prepared by equilibration with 5 column volumes (36 L) of 5 mM Tris, 10 mM NaCl, pH 8.0. The conjugated product was loaded onto the QFF column at a flow rate of 95 cm/hr. The column was then washed with 11 L of equilibration buffer (5 mM Tris, 10 mM NaCl, pH 8.0) at a flow rate of 95 cm/hr followed by a wash with 25 L of equilibration buffer at a flow rate of 268 cm/hr. The protein product was then eluted with 5 mM Tris, 130 mM NaCl, pH 8.0 at a flow rate of 268 cm/hr. The resulting purified PEGPH20 was concentrated to 3.5 mg/mL, using a 30 kDa polyethersulfone (PES) tangential flow filtration (TFF) cassettes (Sartorius) with a 0.2 m² filtration area, and buffer exchanged against 10 mM Histidine, 130 mM NaCl at pH 6.5. The resulting material was tested for enzyme activity as described in Example 4 below. The PEGylated rHuPH20 (PEGPH20) material at a concentration of 3.5 mg/mL (final enzyme activity 140,000 U/mL) was filled, in 3 mL volumes, into 5 mL glass vials with a siliconized bromobutyl rubber stopper and aluminum flip-off seal, and frozen (frozen overnight in a −80° C. freezer, then put in a ˜20° C. freezer for longer storage). The PEGylated rHuHP20 (PEGPH20) contained approximately 4.5 moles of PEG per mole of rHuPH20.

### Example 4

### Determination of Hyaluronidase Activity of Soluble rHuPH20

[0851] Hyaluronidase activity of soluble rHuPH20 in samples such as cell cultures, plasma, purification fractions and purified solutions was determined using either a turbidimetric assay, which is based on the formation of an insoluble precipitate when hyaluronic acid/hyaluronan (HA) binds with serum albumin, or a biotinylated-hyaluronic acid substrate assay, which measures the amount of enzymatically active rHuPH20 or PEGPH20 by the digestion of biotinylated hyaluronic acid (b-HA) substrate non-covalently bound to plastic multi-well microtiter plates.

### A. Microturbidity Assay

[0852] Hyaluronidase activity of soluble rHuPH20 is measured by incubating soluble rHuPH20 with sodium hyaluronate (hyaluronic acid) for a set period of time (10 minutes) and then precipitating the undigested sodium hyaluronate with the addition of acidified serum albumin. The turbidity of the resulting sample is measured at 640 nm after a 30 minute development period. The decrease in turbidity resulting from enzyme activity on the sodium hyaluronate substrate is a measure of the soluble rHuPH20 hyaluronidase activity. The method is performed using a calibration curve generated with dilutions of a soluble rHuPH20 assay working reference standard, and sample activity measurements are made relative to this calibration curve.

[0853] Dilutions of the sample were prepared in Enzyme Diluent Solutions. The Enzyme Diluent Solution was prepared by dissolving 33.0±0.05 mg of hydrolyzed gelatin in 25.0 mL of the 50 mM PIPES Reaction Buffer (140 mM NaCl, 50 mM PIPES, pH 5.5) and 25.0 mL of sterile water for injection (SWFI), and diluting 0.2 mL of 25% Buminate solution into the mixture and vortexing for 30 seconds. This was performed within 2 hours of use and stored on ice until needed. The samples were diluted to an estimated 1-2 U/mL. Generally, the maximum dilution per step did not exceed 1:100 and the initial sample size for the first dilution was not less than 20 μL. The minimum sample volumes needed to perform the assay were as follows: In-process Samples, FPLC Fractions: 80 μL; Tissue Culture Supernatants: 1 mL; Concentrated Material: 80 μL; Purified or Final Step Material: 80 μL. The dilutions were made in triplicate in a Low Protein Binding 96-well plate, and 30 μL of each dilution was transferred to Optilux black/clear bottom plates (BD BioSciences).

[0854] Dilutions of known soluble rHuPH20 with a concentration of 2.5 U/mL were prepared in Enzyme Diluent Solution to generate a standard curve and added to the Optilux plate in triplicate. The dilutions included 0 U/mL, 0.25 U/mL, 0.5 U/mL, 1.0 U/mL, 1.5 U/mL, 2.0 U/mL, and 2.5 U/mL. “Reagent blank” wells that contained 60 μL of Enzyme Diluent Solution were included in the plate as a negative control. The plate was then covered and warmed on a heat block for 5 minutes at 37° C. The cover was removed and the plate was shaken for 10 seconds. After shaking, the plate was returned to the heat block and the MULTIDROP 384 Liquid Handling Device was primed with the warm 0.25 mg/mL sodium hyaluronate solution (prepared by dissolving 100 mg of sodium hyaluronate (LifeCore Biomedical) in 20.0 mL of SWFI. This was mixed by gently rotating and/or rocking at 2-8° C. for 2-4 hours, or until completely dissolved). The reaction plate was transferred to the MULTIDROP 384 and the reaction was initiated by pressing the start key to dispense 30 μL sodium hyaluronate into each well. The plate was then removed from the MULTIDROP 384 and shaken for 10 seconds before being transferred to a heat block with the plate cover replaced. The plate was incubated at 37° C. for 10 minutes.

[0855] The MULTIDROP 384 was prepared to stop the reaction by priming the machine with Serum Working Solution and changing the volume setting to 240 μL (25 mL of Serum Stock Solution [1 volume of Horse Serum (Sigma) was diluted with 9 volumes of 500 mM Acetate Buffer Solution and the pH was adjusted to 3.1 with hydrochloric acid] in 75 mL of 500 mM Acetate Buffer Solution). The plate was removed from the heat block and placed onto the MULTIDROP 384, and 240 μL of serum Working Solutions was dispensed into the wells. The plate was removed and shaken on a plate reader for 10 seconds. After a further 15 minutes, the turbidity of the samples was measured at 640 nm and the hyaluronidase activity (in U/mL) of each sample was determined by fitting to the standard curve.

[0856] Specific activity (Units/mg) was calculated by dividing the hyaluronidase activity (U/ml) by the protein concentration (mg/mL).

### B. Biotinylated Hyaluronan Assay

[0857] The biotinylated-hyaluronic acid assay measures the amount of enzymatically active rHuPH20 or PEGPH20 in biological samples by the digestion of a large molecular weight (˜1.2 megadaltons) biotinylated hyaluronic acid (b-HA) substrate non-covalently bound to plastic multi-well microtiter plates. The rHuPH20 or PEGPH20 in standards and samples are allowed to incubate in a plate coated with b-HA at 37° C. After a series of washes, remaining uncleaved/bound b-HA is treated with Streptavidin Horseradish Peroxidase conjugate (SA-HRP). Reaction between immobilized SA-HRP and the chromogenic substrate, 3,3′,5,5′-tetramethylbenzidine (TMB), produces a blue colored solution. After stopping the reaction with acid, formation of the soluble yellow reaction product is determined by reading the absorbance at 450 nm using a microtiter plate spectrophotometer. The decrease in absorbance at 450 nm resulting from enzyme activity on the biotinylated hyaluronic acid (b-HA) substrate is a measure of the soluble rHuPH20 hyaluronidase activity. The method is performed using a calibration curve generated with dilutions of a soluble rHuPH20 or PEGPH20 reference standard, and sample activity measurements are made relative to this calibration curve.

[0858] Dilutions of the sample and calibrator were prepared in Assay Diluent. The Assay Diluent was prepared by adding 1% v/v pooled plasma (from the appropriate species) to 0.1% (w/v) BSA in HEPES, pH 7.4. This was prepared daily and stored at 2-8° C. Depending upon the species type as well as the anticipated hyaluronidase level, single or multiple dilutions were prepared to ensure at least one sample dilution would fall within the range of the calibration curve. To guide the selection of test sample dilution(s), information known about the dose of hyaluronidase administered, the route of administration, approximate plasma volume of the species and the time point were used to estimate the hyaluronidase activity levels. Each sample dilution was mixed as it was prepared by brief pulse-vortexing and pipet tips were changed in between each dilution. In general, the dilutions began with an initial 50 or 100-fold dilution followed by additional serial dilutions. A seven-point calibration curve of rHuPH20 or PEGPH20 (depending upon the treatment administered) was prepared ranging in concentration from 0.004 to 3.0 U/mL for rHuPH20 and from 0.037 to 27 U/mL for PEGPH20. One hundred microliters (100 μL) of each test sample dilution and calibration curve point was applied to triplicate wells of a 96-well microtiter plate (Immulon 4HBX, Thermo) that had been previously coated with 100 μL per well of b-HA at 0.1 mg/mL and blocked with 250 μL of 1.0% (w/v) Bovine Serum Albumin in PBS. Plate(s) were covered with an adhesive plate seal and incubated at 37° C. for approximately 90 minutes. At the end of the incubation period, the adhesive seal was removed from the plate, samples were aspirated and the plate washed five (5) times with 300 μL per well Wash Buffer (10 mM Phosphate Buffer, 2.7 mM Potassium Chloride, 137 mM Sodium Chloride, pH 7.4, with 0.05% (v/v) Tween 20, PBST) using an automated plate washer (BioTek ELx405 Select CW, Program ‘4HBX1’). One hundred microliters of Streptavidin-HRP Conjugate Working Solution [Streptavidin-HRP conjugate (1:5,000 v/v) in 20 mM Tris-HCl, 137 mM Sodium Chloride, 0.025% (v/v) Tween 20, 0.1% (w/v) Bovine Serum Albumin] was added per well. The plate was sealed and allowed to incubate at ambient temperature for approximately 60 minutes without shaking and protected from light. At the end of the incubation period, the adhesive seal was removed from the plate, samples were aspirated and the plate washed five (5) times with 300 μL per well Wash Buffer as described above. TMB solution (at ambient temperature) was added to each well and allowed to incubate protected from light for approximately five (5) minutes at room temperature. TMB Stop Solution (KPL, Catalog #50-85-06) was then added as 100 μL per well. The absorbance of each well at 450 nm was determined using a microtiter plate spectrophotometer. The response of the Calibration Curve on each plate was modeled using a 4-parameter logistic curve fit. The hyaluronidase activity of each unknown was calculated by interpolation from the calibration curve, corrected for sample dilution factor, and reported in U/mL.

### Example 5

### Combination Anti-Cancer Treatments that Include PEGPH20: Antitumor Effect of PEGPH20 Combined with Nab-Paclitaxel in a Human Pancreatic Tumor Xenograft Model

[0859] A human pancreatic cancer xenograft model was evaluated for antitumor effects of PEGPH20 in combination with nanoparticle albumin-bound (nab)-paclitaxel.

[0860] Tumor cells from the BxPC3 pancreatic cancer cell line (American Tissue Culture Collection (ATCC) CRL-1687) were grown to approximately 80% confluency, trypsinized, collected, washed once in HBSS (Hank's balance salt solution, Mediatech Inc.). Prior to inoculation, cells were washed twice with sterile HBSS, counted using a Nexcelom Cellometer (Nexcelom Bioscience; Lawrence, Mass.) automated counting device which determines cell concentration and viability via Trypan Blue exclusion and diluted with HBSS to a concentration of 1×10⁸ cells/mL on ice before inoculation into animals. Male nude mice (Athymic NCr nu/nu mice, Taconic Laboratories, Inc.) approximately 6 weeks old, were inoculated intramuscularly (IM) with 0.05 mL of cell suspension, peritibially, in the left hind leg (adjacent to the tibia periosteum). The tumors in the animals were assessed twice a week and allowed to grow to a mean tumor volume of approximately 350-400 mm³. Actual tumor volumes were determined using VisualSonics Vevo 770 high-resolution ultrasound (VisulaSonics Inc.; Toronto, Ontario, Canada).

[0861] Tumor-bearing animals were grouped into 8 treatment groups of 8 animals per group and treated intravenously with: 1) vehicle (API buffer; 2) PEGPH20 (4.5 mg/kg); 3) nab-paclitaxel (3 mg/kg; low dose); 4) nab-paclitaxel (10 mg/kg; moderate dose); 5) nab-paclitaxel (30 mg/kg; high dose); 6) PEGPH20 (4.5 mg/kg)+nab-paclitaxel (3 mg/kg); 7) PEGPH20 (4.5 mg/kg)+nab-paclitaxel (10 mg/kg); or 8) PEGPH20 (4.5 mg/kg)+nab-paclitaxel (30 mg/kg). PEGPH20 and nab-paclitaxel were administered separately. PEGPH20 was administered first immediately followed by nab-paclitaxel. The dose and frequency of the treatments was every 3 days for a total of 6 injections starting on Day 0 with a dose volume of 0.1 mL/25 g mouse, or 4.0 mL/kg (i.e. Days 0, 3, 6, 9, 12, 15).

[0862] The tumor volumes of all mice were measured by capturing images using the VisualSonics ultrasound system 2 times per week. Tumor volume was calculated using a 3D-mode imaging software program (VisualSonics® Vevo 770®, v 3.0.0). The percent tumor growth inhibition (% TGI) was calculated by the following equation:

[1−(Tₙ−T₀)/(Cₙ−C₀)]×100%

[0863] In the above equation, Tₙ is the average tumor volume in the treatment group at respective day “n” at the indicated timepoint after treatment; T₀ is the average tumor volume in the treatment group at Day 0 before treatment; Cₙ is the average tumor volume in the control group at respective day “n” at the indicated timepoint after treatment with vehicle; and C₀ is the average tumor volume in the control group at Day 0 before treatment.

[0864] The results are depicted in FIG. 1. The results show that nab-paclitaxel at high and moderate doses inhibited tumor growth, which was enhanced in the presence of PEGPH20. For example, at the last time point where tumor volume was measured, moderate to high doses of nab-paclitaxel (10 mg/kg and 30 mg/kg) inhibited tumor growth by 62% (p<0.01) and 74% (p<0.01), respectively, compared to vehicle control. In the presence of PEGPH20, tumor growth inhibition for the 10 mg/kg dose treatment groups of nab-palitaxel was increased to 72% (p<0.01) and for the 30 mg/kg dose treatment groups of nab-palitaxel was increased to 91% (p<0.01). This is a PEGPH20-mediated increase in efficacy of 19% for the moderate nab-palitaxel dose, and 26% for the high nab-palitaxel dose. No substantial tumor growth inhibition was observed in groups treated with 4.5 mg/mg PEGPH20 or in groups treated with 3 mg/kg low dose nab-paclitaxel in the presence or absence of PEGPH20.

### Example 6

### Combination Anti-Cancer Treatments that Include PEGPH20: Antitumor Effect of PEGPH20 Combined with Nab-Paclitaxel and Gemcitabine in a Human Pancreatic Tumor Xenograft Model

[0865] A. Tumor Growth Inhibition

[0866] The human pancreatic cancer xenograft model described in Example 5 was used to evaluate the antitumor effects of PEGPH20 and nab-paclitaxel combination therapy in further combination with gemcitabine treatment. Prior to performing the study, a route and dose level for gemcitabine was selected based. To do this, tumor-bearing mice were treated with varying doses of gemcitabine (60 mg/kg, 120 mg/kg, 180 mg/kg and 240 mg/kg) once a week for 21 days (day 0, 7, 14 and 21) and tumor volume was monitored as described above. The results are depicted in FIG. 2. The results show that gemcitabine inhibited tumor growth at all doses tested compared to vehicle only. A sub-optimal dose of 180 mg/kg was selected for use in subsequent PEGPH20 combinatorial chemotherapeutic studies. Sub-optimal doses of both gemcitabine and nab-paclitaxel were selected to evaluate the potential benefits of combining the three anti-cancer agents: PEGPH20, gemcitabine and nab-paclitaxel.

[0867] Tumor-bearing mice were grouped into 8 treatment groups of 12 animals per group and treated with: 1) vehicle (API buffer); 2) PEGPH20 (4.5 mg/kg); 3) nab-paclitaxel (10 mg/kg); 4) gemcitabine (180 mg/kg); 5) PEGPH20 (4.5 mg/kg)+nab-paclitaxel (10 mg/kg); 6) PEGPH20 (4.5 mg/kg)+gemcitabine (180 mg/kg); 7) nab-paclitaxel (10 mg/kg)+gemcitabine (180 mg/kg); or 8) PEGPH20 (4.5 mg/kg)+nab-paclitaxel (10 mg/kg)+gemcitabine (180 mg/kg). The PEGPH20 and nab-paclitaxel were administered intravenously and the dose and frequency of treatments was 2 times per week (2×/wk) for a four week dose cycle. Gemcitabine was administered intraperitoneally 24 hours after PEGPH20 and/or nab-paclitaxel every 7 days for three weeks of the dose cycle. Depending on the tested group, the dosing schedule for administration of the agents in a four week cycle is set forth in Table 4b, below.

TABLE 4b
Dosing Schedule

| Schedule | Treatment |
|---|---|
| Day 0 | vehicle or PEGPH20 ± nab-paclitaxel (each |
| | intravenous) |
| Day 1 (24 hours after | gemcitabine (intraperitoneal) |
| day 0 administration) | |
| Day 4 | vehicle or PEGPH20 ± nab-paclitaxel (each |
| | intravenous) |
| Day 7 | vehicle or PEGPH20 ± nab-paclitaxel (each |
| | intravenous) |
| Day 8 (24 hours after | gemcitabine (intraperitoneal) |
| day 7 administration) | |
| Day 11 | vehicle or PEGPH20 ± nab-paclitaxel (each |
| | intravenous) |
| Day 14 | vehicle or PEGPH20 ± nab-paclitaxel (each |
| | intravenous) |
| Day 15 (24 hours after | gemcitabine (intraperitoneal) |
| day 14 administration) | |
| Day 18 | vehicle or PEGPH20 ± nab-paclitaxel (each |
| | intravenous) |
| Day 21 | vehicle or PEGPH20 ± nab-paclitaxel (each |
| | intravenous) |
| Day 25 | vehicle or PEGPH20 ± nab-paclitaxel (each |
| | intravenous) |

[0868] Tumor volume and tumor growth inhibition were determined as described in Example 5. The results are depicted in FIG. 3. The results show that gemcitabine alone, PEGPH20 alone and PEGPH20+gemcitabine exhibited some antitumor activity, but that the antitumor effect was much greater in therapies containing nab-paclitaxel with the greatest antitumor effect exhibited in animals treated with PEGPH20, nab-paclitaxel and gemcitabine.

[0869] Table 4c, below, depicts the results as the percentage growth inhibition relative to vehicle as determined from tumor volume measurements at day 26. The results show that treating animals with PEGPH20 in addition to treatment with nab-paclitaxel and gemcitabine resulted in 81% tumor growth inhibition relative to vehicle, while nab-paclitaxel and gemcitabine treatment without PEGPH20 only resulted in a 66% tumor growth inhibition. Thus, the results show that the PEGPH20 addition to nab-paclitaxel and gemcitabine combination therapy resulted in a 23% increase in efficacy.

TABLE 4c
Antitumor Effect of PEGPH20 in combination
with gemcitabine and/or nab-paclitaxel

| | Tumor Growth | p-value |
|---|---|---|
| | Inhibition (% of | (relative to |
| Treatment | vehicle control) | vehicle control) |
| gemcitabine | 25 | 0.0110 |
| PEGPH20 + gemcitabine | 38 | <0.0001 |
| PEGPH20 | 39 | <0.0028 |
| nab-paclitaxel | 63 | <0.0001 |
| nab-paclitaxel + | 66 | <0.0001 |
| gemcitabine | | |
| PEGPH20 + nab-paclitaxel | 71 | <0.0001 |
| PEGPH20 + nab-paclitaxel + | 81 | <0.0001 |
| gemcitabine | | |

[0870] B. Median Survival Time

[0871] Following the first four week dosing cycle as set forth in part A, the dosing cycle was repeated two times and time to survival endpoint was followed over time. Briefly, in each dosing cycle, animals were treated with vehicle or PEGPH20 (4.5 mg/mL) with or without nab-paclitaxel (10 mg/kg) intravenously twice a week for four weeks. In each cycle, groups receiving gemcitabine were administered gemcitabine (180 mg/kg) 24 hours after PEGPH20 and/or nab-paclitaxel every 7 days for three weeks of the dose cycle. Time to survival endpoint, a measure of animal survival, was defined as (a) time to tumor volume of greater than 2000 mm³, (b) time to a greater than 20% bodyweight loss, or (c) time to animal duress or death.

[0872] The results are set forth in FIG. 4 and Table 5. The results show that median survival time to endpoint of animals treated only with gemcitabine was 38 days, animals treated with nab-paclitaxel and gemcitabine was 52 days and animals treated with PEGPH20, nab-paclitaxel and gemcitabine was 68 days. Thus, the results show that the addition of PEGPH20 to treatment with nab-paclitaxel and gemcitabine increased median survival time compared to any other treatment with an increased efficacy of 31% compared to treatment with nab-paclitaxel and gemcitabine without PEGPH20 and an increased efficacy of 79% compared to treatment with only gemcitabine.

TABLE 5
Median Survival Time

| Treatment | Median Survival Time (days) |
|---|---|
| gemcitabine | 38 |
| nab-paclitaxel + gemcitabine | 52 |
| PEGPH20 + nab-paclitaxel + gemcitabine | 68*^{‡} |

*Relative to vehicle (p < 0.0001)
^{‡}Relative to nab-paclitaxel + gemcitabine (p = 0.0008)

[0873] C. Measurement of Tumor Biomarkers Biomarkers carbohydrate antigen 19-9 (CA19-9) and carcinoembryonic antigen (CEA) associated with pancreatic cancer were tested to measure therapeutic response. Animals were treated as described in part A. Serum was collected from satellite animals (n<3) from each group on day 0, 6, 13 and 20 of the first dosing cycle. Human CA19-9 was measured using a CA 19-9 ELISA kit (Catalog No. CA199T, Calbiotech, Spring Valley, Calif.) and CEA tumor antigen was measured using a CEA ELISA kit (Catalog No. CE062T, Calbiotech, Spring Valley, Calif.).

[0874] The results are set forth in FIG. 5 (A-B). The results show that the presence of PEGPH20 treatment resulted in a reduction of the measured markers in all treatment groups. For example, at day 20, the level of CA19-9 marker detected was similar in all groups treated with PEGPH20 ranging from approximately 40-60 U/mL. In contrast, the level of CA19-9 marker in animals treated with nab-pacilitaxel or nab-paclitaxel+gemcitabine was approximately double that of animals also treated with PEGPH20 and was approximately 110 U/mL. Animals treated only with gemcitabine exhibited CA19-9 levels that were approximately similar to vehicle only control. Hence, the results show that animals treated with PEGPH20+nab-paclitaxel had reduced CA19-9 levels compared to animals treated only with nab-paclitaxel; animals treated with PEGPH20+gemcitabine had reduced CA19-9 levels compared to animals treated only with gemcitabine; and animals treated with PEGPH20+nab-paclitaxel+gemcitabine had reduced CA19-9 levels compared to animals treated only with nab-paclitaxel+gemcitabine. For animals treated with PEGPH20+nab-paclitaxel+gemcitabine, the CA19-9 was reduced 49% compared to animals treated with nab-paclitaxel+gemcitabine in the absence of PEGPH20.

[0875] The results were similar when CEA marker was measured. Using this marker, the results show that the levels of CEA were not substantially changed at day 20 in animals treated only with nab-paclitaxel compared to vehicle control, as CEA was measured at approximately 20 to 25 ng/mL in these groups. In animals treated with gemcitabine or nab-paclitaxel+gemcitabine, there was some reduction in the measured CEA marker at day 20 to approximately 15 ng/mL. In the presence of PEGPH20, the level of the marker that was measured was considerably reduced compared to the treatment groups without PEGPH20. For example, in animals treated only with PEGPH20, the measured CEA at day 20 was approximately 7-8 ng/mL. In animals treated with PEGPH20+gemcitabine, PEGPH20+nab-paclitaxel, or PEGPH20+nab-paclitaxel+gemcitabine, the levels of CEA at day 20 were too low to quantitate by ELISA.

### Example 7

### Assessment of the Effect of PEGPH20 Treatment in a High Peritumoral Hyaluronan (HA) Tumor Model

[0876] To assess the effect of PEGPH20 on high levels of peritumoral HA, a BXPC3-Has3 tumor cell line was generated to establish an HA^{high} mouse xenograft tumor model. BxPC3 cells (ATCC Cat. No. CRL-1687) were cultured under standard culture conditions using complete RPMI media. A lentiviral system was generated to express the human hyaluronan synthase 3 cDNA transcript (set forth in SEQ ID NO:212). The generated lentiviral vector expressing hHAS3 cDNA was designated pLV-EF1a-hHAS3-IRES-Hyg and is set forth in SEQ ID NO:213. BX-PC3-Has3 stable cell line were generated by viral infection with pLV-EF1α-hHAS3-IRES-Hyg, followed by hygromycin selection. Cells infected to overexpress hHAS3 were used in all experiments.

[0877] To confirm HA levels, color intensity in the tumor section was measured with the Aperio spectrum program. The tumor was graded as HA^{High} at strong HA staining over 25% of tumor section; as HA^{Moderate} at strong HA staining between 10 and 25% of tumor section; as HA^{Low} at strong HA staining under 10% of tumor section.

[0878] NCr (nu/nu) mice that were 5 to 6 weeks old and weighed between 20-25 g were inoculated with BxPC-3-Has3 cells (5×10⁶/50 μL) adjacent to the right tibial periosteum, generating high pressure tumors. The length (L) and width (W) of the solid tumor mass were measured by caliper and the tumor volume (TV) was calculated as: (L×W²)/2. When the volume of tumors reached approximately 1500 to 2000 mm³ in diameter, mice were staged into two treatment groups: (1) BxPC3 HA^{high}, vehicle control or (2) BxPC3 HA^{high}, PEGPH20.

[0879] Animals were administered with either vehicle (10 mM Histidine, pH 6.5, 130 mM NaCl) or PEGPH20 (4.5 mg/kg) at 0 hours and again at 42 hours. With the first PEGPH20 or vehicle control treatment (at 48 hours prior to sacrifice, i.e. at t=0 hrs), animals also were treated with 240 mg/kg gemcitabine, intraperitoneally, and 10 mg/kg paclitaxel (Abraxane®), intravenously. Two hours prior to sacrifice (46 hours), animals were treated intraperitoneally with HYPDXYPROBE™ (pimonidazole hydrochloride; Chemicon International, Temecula, Calif.) at 60 mg/kg and also with 0.5 mL of BrdU. Five minutes prior to sacrifice (48 hours), animals were treated intravenously with 75 μL of 0.6 mg/mL fluorescent carbocyanine dissolved in 75% DMSO 1,1′-dioctadecyl-3,3,3′,3′-tetramethylindocarbocyanine perchlorate (DiI).

[0880] The animals were sacrificed at 48 hours. Whole tumors were harvested, tissues cooled to −20° C. on aluminum blocks, covered in embedding OCT medium (Sakura Finetek, Torrance, Calif.) and stored at −80° C. until sectioning. Tumor cryosections were cut into 10 μm sections and processed for immunohistochemistry or imaged microscopically. Effects on vascular perfusion and tumor hypoxia were assessed.

[0881] A. Vascular Perfusion

[0882] Non-stained, fresh cryosections were scanned with a fluorescence microscope imaging system (BD CARV II Confocal Imager, Sparks, Md.; Quentem 512sc camera (Photometrics, Tucson, Ariz.); MIV2000 motorized x-y stage, and MetaMorph System, Sunnyvale, Calif.). Entire tumor sections were scanned at 10× for fluorescent carbocyanine (DiI) signal (Excitation 562 nm/emission 624 nm) to determine tumor perfusion. Images were analyzed using an Image-Pro Analyzer 7.0 (Media Cybermetrics, Bethesda, Md.). Whole tumor area and positive staining area were determined. The vascular perfusion in each tumor was calculated as percentage (signal) positive over the entire tumor section.

[0883] The results are set forth in Table 6. The results show that PEG-PH20 treatment mediated dye perfusion in BxPC3-HAS3 tumors, with a significant increase in blood vessel perfusion in tumors from mice treated with PEGPH20 versus control treated tumors. As summarized in Table 6, animals treated with PEGPH20 showed an increase in vascular perfusion with a mean area of 7.24±1.78, which is a 116.9% increase over control animals.

TABLE 6
PEGPH20-Mediated Increase in Vascular
Perfusion in HA^{high} tumors

| | Average % vascular area | | |
|---|---|---|---|
| | in whole tumor section | P | % increase |
| control (n = 7) | 3.42 ± 0.53 | — | — |
| PEGPH20 (n = 6) | 7.24 ± 1.78 | <0.0001 | 116.9 |

[0884] B. Hypoxia

[0885] Tumor sections from treated animals were compared for hypoxic regions by visualizing pimonidazole hydrochloride (HYPDXYPROBE™). Specifically, after sacrifice, cryosections that had been blocked with goat serum for non-specific staining were probed for 1 hour at room temperature with a 1:50 dilution of anti-pimonidazole antibody (HYPDXYPROBE™-1 Mab-1, mouse IgG₁; Chemicon International, Temecula, Calif.) to detect pimonidazole adducts or with a 1:100 dilution anti-CD31 antibody (rat, BD Pharmingen, San Diego, Calif.) to detect endothelial cells. After washing to remove the primary reagent, either a FITC goat anti-mouse secondary antibody (to visualize HYPDXYPROBE™-1 Mab-1, 1:100 dilution; Vector Labs Burlingame, Calif., USA) or a Texas Red goat anti-rat secondary antibody (to visualize CD31 endothelial cells; 1:100 dilution; Vector Labs Burlingame, Calif. USA) was used as a secondary reagent for 30 minutes at room temperature. Sections were imaged using the Image-Pro Analyzer 7.0 (Media Cybermetrics, Bethesda, Md.) Imaging System. For CD31 imaging, the excitation wavelength was 562 nm and an emission wavelength was 624 nm. For imaging for pimonidazole hydrochloride (HYPDXYPROBE™), the excitation wavelength was 490 nm and the emission wavelength was 520 nm.

[0886] The results are set forth in Table 7. The results showed that PEGPH20, which mediates HA removal, results in reduced hypoxia in BxPC3-Has3 tumors. Control animals had a mean percent hypoxic area in whole tumor section of 3.98±2.70%. Animals treated with PEGPH20 had reduced hypoxia area in tumors with a mean area of 0.86±1.07, which is a 78% decrease over control animals.

TABLE 7
PEGPH20-Mediated Decrease in Hypoxic Areas in HA^{hlgh} tumors

| | % hypoxia area in | | |
|---|---|---|---|
| | whole tumor section | P | % decrease |
| control (n = 7) | 3.98 ± 2.70 | — | — |
| PEGPH20 (n = 6) | 0.86 ± 1.07 | 0.035 | 78 |

### Example 8

### Effect of Combination Anti-Cancer Treatments that Include PEGPH20 in a High Peritumoral Hyaluronan (HA) Tumor Model: Treatment of a High Peritumoral Hyaluronan (HA) Triple Negative Breast Cancer Tumor Model with PEGPH20 Combined with Nab-Paclitaxel

[0887] The MDA-MB-468 triple negative breast cancer (TNBC) cell line was generated to overexpress the hHAS3A cDNA transcript (SEQ ID NO:212) and thereby establish a HA^{high} TNBC model. MDA-MB-468 cells (ATCC Cat. No. HTB-132), cultured under standard culture conditions using complete RPMI medium, were infected with the hHAS3 cDNA expressing lentiviral vector pLV-EF1α-hHAS3-IRES-Hyg (SEQ ID NO:213), described above, followed by hygromycin selection to generate the stable, hHAS3-expressing cell line MDA-MB-468/HAS3.

[0888] MDA-MB-468/HAS3 cells, suspended in RPMI, were injected into nude mice. Tumor volume was measured as described above. On day 17, when the tumors reached a volume of approximately 300 mm³, the animals were divided into 6 treatment groups, which were administered 1) vehicle; 2) 1 mg/kg nab-paclitaxel; 3) 3 mg/kg nab-paclitaxel; 4) 10 mg/kg nab-paclitaxel; 5) 4.5 mg/kg PEGPH20; or 6) 1 mg/kg nab-paclitaxel and 4.5 mg/kg PEG20 intravenously. The tumor volumes were measured every 3 to 4 days for 45 days.

[0889] The results are set forth in FIGS. 6A and 6B. Animals in treatment group 1, receiving vehicle only, exhibited progressive tumor growth throughout the course of the study. On the final day of the study (day 62), the average tumor size had just over doubled in volume. The tumors of animals in treatment groups 2 and 3, receiving nab-paclitaxel at 1 or 3 mg/kg exhibited an initial (approximately 30%) decrease in tumor volume on days 17-27 post cell implantation (0-10 days post treatment), but then tumor growth resumed at a reduced rate compared to the vehicle control animals. On the final day of the study, the average tumor volume was just under twice the starting volume.

[0890] The pattern of tumor growth observed for PEGPH20-treated animals (group 5) was similar to that for groups 2 and 3, but the average tumor size for group 5 was slightly smaller than those for groups 2 and 3 on the final day. The average tumor size of the animals in group 4, which received 10 mg/kg nab-paclitaxel, followed the same trend as groups 2, 3, and 5 for the first 10 days after treatment (study days 17-27), but then remained at the reduced volume for an additional 11 days and then progressively decreased over the remainder of the study an additional 30% to yield an average tumor volume at the end of the study that was one-third the average starting tumor volume.

[0891] The combination of 1 mg/kg nab-paclitaxel and PEGPH20 (group 6) resulted in a substantial decrease in average tumor volume. These results show that there are synergistic effects upon treatment with the combination of nab-paclitaxel and PEGPH20, which results in a significantly improved efficacy on tumor growth inhibition compared to the individual treatments at the same dose. The combination therapy resulted in a similar decrease in tumor volume to that observed for animals receiving 10-fold greater nab-paclitaxel as a single therapy (10 mg/kg nab-paclitaxel (group 5)), which also yielded a final average tumor volume that was approximately one-third the average starting tumor volume.

### Example 9

### Treatment of Human Cancer Subjects with PEGPH20, Nab-Paclitaxel and Gemcitabine

[0892] A Phase II clinical study was conducted to compare the treatment effects of: (1) PEGPH20 combined with nab-paclitaxel and gemcitabine (“PAG” arm), to the treatment effects of: (2) nab-paclitaxel and gemcitabine (“AG” arm), in subjects having previously untreated Stage IV pancreatic cancer (HALO-109-202 clinical study; see, e.g., clinicaltrials.gov/ct2/show/NCT01839487). In an open-label, randomized study of 279 previously untreated subjects having Stage IV metastatic pancreatic ductal adenocarcinoma (PDAC), it was found that subjects with “HA-high” tumors, as determined by an affinity histochemistry-based companion diagnostic test developed by Roche Ventana, showed significant improvements in progression-free survival (PFS) and objective response rate (ORR), and a trend toward improved overall survival (OS) when subjected to PAG treatment as opposed to the standard of care (AG) treatment. PAG treatment was found to increase progression free survival (PFS) and overall survival (OS), compared to AG treatment, in all subjects regardless of tumor HA content; the effect however was more pronounced in subjects having “HA-high” tumors. The following sections provide a description of the clinical trials that demonstrate these results.

### A. Methods

[0893] 1. Study Design

[0894] The study was conducted in two (2) stages. In Stage 1, patients were randomized 1:1 to receive PEGPH20 plus nab-paclitaxel and gemcitabine (PAG) or nab-paclitaxel and gemcitabine (AG). An observed imbalance in thromboembolic (TE) events in the PAG arm led to a temporary clinical hold. In Stage 2, the trial was resumed with 2:1 randomization for treatment with PAG vs. AG; protocol amendments were made to exclude patients with TE events and to initiate enoxaparin prophylaxis in both study arms. A primary safety endpoint of TE event rate also was added to assess the efficiency of enoxaparin prophylaxis in reducing the TE risk. Tumor HA levels were assessed retrospectively using an affinity histochemistry assay and scoring algorithm for HA in the extracellular matrix (ECM; Ventana HA RxDx Assay).

[0895] 2. Subjects

[0896] Eligible subjects had Stage IV pancreatic ductal adenocarcinoma (PDAC) with liver and/or lung metastases (additional metastatic sites were permitted), no prior treatment for metastatic disease, life expectancy ≥3 months, and a Karnofsky Performance Status (KPS) score ≥70%. Availability of tumor tissue for HA testing was mandatory. Adequate renal, bone marrow and hepatic function were required for all patients. In Stage 2, subjects with evidence of a TE event during the screening period, pre-existing carotid artery disease, a history of transient ischemic attack or cerebrovascular accident, a previous major hemorrhage while receiving low-molecular-weight heparin, or contraindication to heparin per National Comprehensive Cancer Network guidelines were excluded (Streiff et al. (2013) J. Natl. Compr. Canc. Netw. 11:1402-29). In Stage 2, the amended protocol also required subjects to discontinue PEGPH20 if a TE event occurred.

[0897] 3. Treatments

[0898] Each 4-week cycle included 3 weeks on treatment, and 1 week off-treatment. PEGPH20 (3 μg/kg) was administered intravenously twice weekly during Cycle 1 and weekly during subsequent cycles. AG was administered at standard doses (nab-paclitaxel 125 mg/m² and gemcitabine 1,000 mg/m²). In the PAG arm of the study, the initial AG dose in Cycle 1/Week 1 was administered 24 hours after the first dose of PEGPH20; subsequent AG doses were given 2 to 4 hours after PEGPH20 was administered. All subjects received dexamethasone 8 mg orally 2 hours before and 8 to 12 hours after each PEGPH20 dose to manage musculoskeletal events, and subjects in Stage 2 received daily enoxaparin prophylaxis (40 mg/day initially, later amended to 1 mg/kg/day per updated guidelines) (Borad et al., (2012) J. Clin. Oncol. 30:Suppl, (Abstr: 2579); and Khorana et al., (2014) J Thromb. Haennost. 12:1928-31).

[0899] 4. Endpoints and Assessments

[0900] The primary endpoints were progression-free survival (PFS) and incidence of TE events in Stage 2. Secondary endpoints were PFS by HA level, overall survival (OS), and objective response rate (ORR). Exploratory endpoints included OS by HA level and duration of response (DoR).

[0901] Tumor assessments were performed every 8 weeks and evaluated by central independent blinded review using Response Evaluation Criteria in Solid Tumors (RECIST) v1.1 (Eisenhauer et al. (2009) Eur. J Cancer 45:228-47). Adverse events (AEs) were assessed for severity using the National Cancer Institute Common Terminology Criteria for Adverse Events (NCI-CTCAE) version 4.03. (US Department of Health and Human Services, National Institutes of Health, National Cancer Institute: Common Terminology Criteria for Adverse Events (CTCAE) version 4.03: Jun. 14, 2010, which are publicly available. See for example: //evs.nci.nih.gov/ftp1/CTCAE/CTCAE_4.03_2010-06-14_QuickReference_8.5x11.pdf

[0902] 5. Statistical Methods and Analyses

[0903] Kaplan-Meier Survival Curves

[0904] The Kaplan-Meier Method was used to measure the fraction of subjects with a given survival outcome (PFS or OS) at a given time following treatment with either PAG or AG (Kaplan et al., J. Am. Stat. Assoc. 53: 457-481 (1958)). The Kaplan-Meier survival curve for each treatment arm (i.e., PAG or AG) is a plot of the survival (or progression-free survival) probability against time and can be used to estimate median survival time for that treatment arm.

[0905] For each treatment arm, a Kaplan-Meier survival curve/plot was obtained. The Kaplan-Meier survival curve/plot is defined as the probability of surviving (overall survival (OS) or progression-free survival (PFS)) in a given length of time, while considering time in as many small intervals as possible (seen as a series of declining horizontal steps in the Kaplan-Meier plot). Computing probabilities of survival, in the case of OS, or progression-free survival, in the case of PFS, at a certain time interval, and multiplying successive probabilities at later time intervals by any earlier computed probabilities provides the final survival outcome estimate. As events (death, for OS, or progressed disease, for PFS) are assumed to occur independently of one another, the probabilities of surviving from one interval to the next can be multiplied together to give the cumulative survival probability.

[0906] Thus, the probability of survival (for OS) or progression-free survival (for PFS) at time tj, S(tj), is calculated from S(tj−1), the probability of being alive at tj−1 (the immediately preceding time interval), nj, the number of subjects alive just before tj, and dj, the number of deaths or progressed disease at tj, by:

S(tj)=S(tj−1)(1−dj/nj), where t0=0 and S(0)=1.

[0907] The value of S(t) is constant between times of events and, therefore, the estimated probability is a step function that changes value only at the time of each event. This estimator allows each subject to contribute information to the calculations for as long as they are known to be event-free. Confidence intervals for the survival probability also were calculated.

[0908] Log-Rank Test

[0909] A 2-sided log-rank test was used to compare the survival curves of the two treatment arms (Peto et al., Br. J. Cancer, 35: 1-39 (1977)). The method calculates at each time interval, for each treatment arm, the number of events (death for OS; progressed disease for PFS) one would expect since the previous event if there were no difference between the two treatment arm groups. These values are then summed over all event times to give the total expected number of events in each group, say Eᵢ for group i. The log-rank test compares observed number of events, say Oᵢ for treatment group i, to the expected number by calculating the test statistic:

$${X}^{2} = {\sum }_{i = 1}^{g} {( Oi - Ei )}^{2} / Ei$$

[0910] This value is compared to a χ2 distribution with (g−1) degrees of freedom, where g is the number of groups (in this case, g=2 because there are two treatment arms). In this manner, a P-value can be computed to calculate the statistical significance of the differences between the complete Kaplan-Meier survival curves of the two treatment arms.

[0911] The P value represents the probability of observing a difference as extreme as that observed, if in fact the null hypothesis is true. If the P value from the study results is smaller than the alpha value (generally, log-rank P value ≤0.05), it is concluded that the observed difference is unlikely to be from chance, and that it arose from the treatment used in the clinical trial.

[0912] The log-rank test was stratified according to baseline Karnofsky Performance Status (KPS) (i.e., the survival in each treatment group was compared within each baseline KPS (the ‘strata’) by the log-rank method, and the differences within each stratum combined to give an overall comparison of treatments that has been adjusted for baseline KPS).

[0913] Cox Regression Analysis

[0914] In contrast to the survivor function, which focuses on not having an event, the hazard function focuses on the risk of an event occurring (death, in case of OS or progressed disease, in case of PFS). The hazard relates to the incident (current) event rate, while survival reflects the cumulative non-occurrence of an event. The hazard can be denoted by h(t) or λ(t) and is the probability that a subject who is under observation at a time t has an event at that time, i.e., the risk of an event occurring at time t. It is estimated as follows:

h(t)=h₀(t)×exp(b₁x₁+b₂x₂+ . . . +bₚxₚ) where,

[0915] t represents the survival time; and

[0916] h(t) is the hazard function determined by a set of p covariates (x1, x2, . . . , xp) (in a univariate analysis, there is only one variable, i.e., x1).

[0917] The coefficients (b₁, b₂, . . . , bₚ) measure the impact (i.e., the size of the effect) of covariates. h₀, the baseline hazard, corresponds to the value of the hazard at time t=0 where all the xi are equal to zero (the quantity exp(0) equals 1).

[0918] The quantities exp(bi) are called hazard ratios (HR). A value of bi greater than zero, or equivalently a hazard ratio greater than one, indicates that as the value of the i^{th} covariate increases, the event hazard increases and thus the length of survival decreases.

[0919] The hazard ratio (HR) was estimated using a stratified Cox regression model. The hazard ratio is defined as the ratio of: [chance of an event occurring in the treatment (PAG) arm]/[chance of an event occurring in the control(AG) arm] or, alternatively, the ratio of [risk of outcome in one group]/[risk of outcome in another group], at a given interval of time. HR is a measure of the magnitude of the difference between the two Kaplan-Meier survival plots (for the PAG and AG treatments arms, respectively), while the P value, discussed above, measures the statistical significance of this difference. The numerical value of the HR expresses the relative hazard reduction achieved by the study treatment (PAG) compared to the hazard reduction achieved by the control treatment (AG). Thus, for example, a hazard ratio of 0.70 means that the study treatment (PAG) provides 30% risk reduction compared to the control treatment (AG). A HR of 1.0 means that the study treatment (PAG) provides zero risk reduction, compared to the control treatment (AG).

[0920] Cochran-Mantel-Haenszel Test

[0921] The Objective Response Rate (ORR) for each treatment arm was determined for subjects that showed complete response (CR) or partial response (PR), subjects with stable disease (SD) or progressed disease (PD) being non-responders, using the Cochran-Mantel-Haenszel test for analyzing the association between two binary variables. SD, PD, CR and PR were determined using Response Evaluation Criteria in Solid Tumors (RECIST) v1.1.

[0922] The ORR is a probability that can be calculated by taking the number of subjects that are complete responders (CR)+the number of subjects that are partial responders (PR) and dividing by the total number of subjects for each treatment group (PD, SD, PR, CR):

ORR=(PR+CR)/(PR+CR+PD+SD)

[0923] Alternatively, the denominator can also include subjects that either have an unknown response or non-evaluable (NE) responses:

ORR=(PR+CR)/(PR+CR+PD+SD+NE+Unk)

[0924] a. Study Populations

[0925] Data from Stage 1 and Stage 2 were combined for this analysis. The intent-to-treat (ITT) population included all randomized subjects and was used to summarize baseline characteristics and efficacy analyses. The efficacy evaluable (EE) population included all subjects who received study medication, had measurable disease at baseline, and had a post-baseline response assessment or disease progression; the EE population was the pre-specified primary analysis population for overall PFS (primary endpoint). The safety population included subjects who received any study medication; the primary safety endpoint of TE event rate was assessed for the safety population in Stage 2 of the trial. Baseline characteristics and efficacy outcomes were also analyzed by tumor HA level for patients with available HA data.

[0926] b. Efficacy

[0927] Median PFS and OS were determined using the Kaplan-Meier method; treatment differences were analyzed using a 2-sided log-rank test stratified by baseline KPS and the hazard ratio (HR) estimated using a stratified Cox regression model. Analyses were performed when ≥95% of enrolled patients had discontinued study treatment. The ORR for each treatment group was summarized and compared between groups using the Cochran-Mantel-Haenszel test.

[0928] c. Safety

[0929] The primary safety endpoint was defined as the proportion of subjects who experienced a TE event in Stage 2 of the study. TE rates between treatment arms were compared using the Fisher exact test. Adverse events were summarized by Medical Dictionary for Regulatory Activities preferred terms and descriptive statistics (MedDRA MSSO: Medical Dictionary for Regulatory Affairs (MedDRA) versions 16.0 (March 2013) through 19.1 (September 2016) at meddra.org/how-to-use/support-documentation).

### B. Results

[0930] 1. Subjects and Treatment

[0931] a. Subject Disposition

[0932] In Stage 1 of the study, 146 subjects were randomized 1:1 to receive PAG or AG. An imbalance in TE events between treatment arms resulted in a brief clinical hold. During this time, 29 patients who were receiving PAG continued treatment with AG therapy alone, seven of whom resumed PEGPH20 when the trial resumed. In Stage 2 of the trial, an additional 133 patients were randomly assigned 2:1 to receive PAG versus AG. Randomization in both stages (n=279) was stratified by Karnofsky Performance Status (70% or 80% versus 90% or 100%; FIG. 7). The intent to treat (ITT) population included all randomly assigned subjects. The safety population included all subjects who received any study medication. The efficacy evaluable population included all subjects who received any study medication and had a postbaseline radiographic assessment (e.g., by computed tomography (CT) scan) or disease progression.

[0933] b. Baseline Characteristics

[0934] Subject demographics and disease characteristics are summarized in Table 8. Baseline characteristics were generally balanced between treatment arms.

[0935] c. Treatment Exposure

[0936] Overall treatment exposure, including median duration of treatment, median number of treatment cycles initiated, and median number of doses for each agent, was comparable in both arms (Table 8b), even though 29 subjects in the PAG arm in Stage 1 experienced interruption or termination of PEGPH20 therapy. In Stage 2, median duration of study treatment was longer in the PAG arm, both overall and in the HA-high group. Median relative dose intensity for AG was similar for treatment arms (gemcitabine 74% PAG versus 77% AG; nab-paclitaxel 72% PAG versus 76% AG), indicating that the addition of PEGPH20 did not affect the ability to administer chemotherapy.

TABLE 8
Subject demographics and baseline characteristics.

| | ITT (N = 279) | | | | HA-High (n = 84) | | | |
|---|---|---|---|---|---|---|---|---|
| | PAG | | AG | | PAG | | AG | |
| Characteristic | (n = 166) | | (n = 113) | | (n = 49) | | (n = 35) | |
| Age, years | | | | | | | | |
| Mean (SD) | 64 | (10) | 65 | (9) | 66 | (9) | 67 | (7) |
| Range | 28-83 | | 33-81 | | 46-83 | | 44-81 | |
| ≥65 | 88 | (53) | 62 | (55) | 33 | (67) | 22 | (63) |
| Sex | | | | | | | | |
| Male | 101 | (61)* | 55 | (49)* | 26 | (53) | 15 | (43) |
| Female | 65 | (39)* | 58 | (51)* | 23 | (47) | 20 | (57) |
| Race | | | | | | | | |
| White | 146 | (88) | 91 | (81) | 40 | (82) | 25 | (71) |
| Black | 11 | (7) | 9 | (8) | 6 | (12) | 6 | (17) |
| Asian | 5 | (3) | 5 | (4) | 1 | (2) | 2 | (6) |
| Other† | 4 | (2) | 8 | (7) | 2 | (4) | 2 | (6) |
| KPS, % | | | | | | | | |
| 70 or 80 | 53 | (32) | 41 | (36) | 16 | (33) | 13 | (37) |
| 90 or 100 | 113 | (68) | 72 | (64) | 33 | (67) | 22 | (63) |
| Primary pancreas | | | | | | | | |
| tumor location‡ | | | | | | | | |
| Head | 63 | (38) | 58 | (51) | 12 | (25)* | 20 | (57)* |
| Body | 71 | (43) | 40 | (35) | 23 | (47)* | 10 | (29)* |
| Tail | 32 | (19) | 14 | (12) | 14 | (29)* | 4 | (11)* |
| No. of metastatic | | | | | | | | |
| sites | | | | | | | | |
| 1 | 112 | (68) | 88 | (78) | 30 | (61) | 28 | (80) |
| 2 | 43 | (26) | 17 | (15) | 14 | (29) | 7 | (20) |
| ≥3 | 11 | (7) | 8 | (7) | 5 | (10) | 0 | |
| Sites of metastasis§ | | | | | | | | |
| Liver | 153 | (92) | 97 | (86) | 44 | (90) | 26 | (74) |
| Lung | 43 | (26) | 31 | (27) | 16 | (33) | 11 | (31) |
| Peritoneum | 15 | (9) | 10 | (9) | 6 | (12) | 5 | (14) |
| Other | 24 | (7) | 10 | (4) | 8 | (8) | 0 | |
| Serum CA 19-9,∥ | | | | | | | | |
| U/mL | | | | | | | | |
| <37 | 24 | (15) | 17 | (15) | 10 | (20) | 4 | (11) |
| ≥37 | 140 | (84) | 93 | (82) | 39 | (80) | 30 | (86) |
| Prior PDAC | | | | | | | | |
| treatment | | | | | | | | |
| Surgery | 12 | (7) | 12 | (11) | 8 | (16) | 10 | (29) |
| Adjuvant | 10 | (6) | 9 | (8) | 7 | (14) | 7 | (20) |
| chemotherapy | | | | | | | | |
| Adjuvant radiation | 6 | (4) | 6 | (5) | 4 | (8) | 5 | (14) |
| Stage I-III at | 15 | (9) | 15 | (13) | 10 | (20) | 10 | (29) |
| diagnosis | | | | | | | | |
| History of diabetes | 50 | (30) | 42 | (37) | 17 | (35) | 15 | (43) |

NOTE:
Data given as No. (%) unless otherwise indicated.
Abbreviations: AG, nab-paclitaxel plus gemcitabine; CA, cancer antigen; HA, hyaluronan; HA-high, extracellular matrix hyaluronan staining ≥50% of tumoral area; ITT, intent to treat; KPS, Kamofsky Performance Status; N/A, not applicable; PAG, PEGPH20 plus nab-paclitaxel plus gemcitabine; PDAC, pancreatic ductal adenocarcinoma; SD, standard deviation.
*Statistically significant differences between treatment arms (P = 0.05) were observed between the sexes in the ITT population (P = 0.049) and in the primary pancreas tumor location in the patients with HA-high tumors (P = 0.006).
†Includes Hawaiian-Pacific, Native American, and multiple races.
‡Information on primary tumor location is missing for one patient (AG group; HA-high).
§Liver and/or lung metastases were required for inclusion in the study. Patients may have had multiple metastatic sites and, therefore, were included in more than one group.
∥In the HA-high group, serum CA19-9 values were measured for 49 patients in the PAG arm and 34 in the AG arm.

TABLE 8b
Treatment exposure (safety population, Stages 1 and 2)

| | All Subjects | | | | HA-High | | | |
|---|---|---|---|---|---|---|---|---|
| Treatment | PAG | | AG | | PAG | | AG | |
| Treated population, No. | 160 | | 100 | | 48 | | 32 | |
| Duration of treatment, | | | | | | | | |
| months | | | | | | | | |
| Median (range) | 3.3 | (0.1-18.2) | 3.3 | (0.0-12.9) | 3.3 | (0.1-18.2) | 3.2 | (0.0-12.9) |
| Mean (standard deviation) | 4.7 | (4.24)* | 3.7 | (2.94)* | 5.4 | (4.82)* | 3.2 | (2.78)* |
| Treatment cycles initiated, | 4 | (1-19) | 4 | (1-14) | 4 | (1-19) | 4 | (1-14) |
| median (range), No. | | | | | | | | |
| Subjects receiving four or | 95 | (59) | 56 | (56) | 31 | (65)* | 17 | (53)* |
| more cycles, No. (%) | | | | | | | | |
| Subjects receiving six or more | 71 | (44) | 37 | (37) | 23 | (48)* | 9 | (28)* |
| cycles, No. (%) | | | | | | | | |
| Relative dose intensity, | | | | | | | | |
| Median (range), % | | | | | | | | |
| PEGPH20 | 68 | (1-180) | — | | 65 | (11-180) | — | |
| Gemcitabine | 74 | (32-107) | 77 | (32-102) | 72 | (32-104) | 73 | (33-100) |
| Nab-paclitaxel | 72 | (27-107) | 76 | (30-102) | 69 | (33-104) | 71 | (30-101) |

Abbreviations: AG, nab-paclitaxcl plus gemcitabine; HA, hyaluronan; HA-high, extracellular matrix hyaluronan staining ≥50% of tumoral area; PAG, PEGPH20 plus nab-paclitaxel plus gemcitabine.
*Statistically significant differences between treatment arms (P = 0.05) were observed in mean duration of treatment of the ITT and HA-high subject populations (P = 0.04 and P = 0.02, respectively) and in the treatment cycles for HA-high subjects (P = 0.02).

[0937] 2. Efficacy

[0938] Progression-free survival (PFS) was assessed in subjects receiving PAG versus those receiving AG, using Kaplan-Meier (K-M) analysis. The primary endpoint of PFS was improved in the PAG arm (6.0 months) versus the AG arm (5.3 months; HR=0.73; 95% confidence interval (CI), 0.53-1.00; P=0.049) in the protocol-defined EE population (FIG. 8A) and in the ITT population. The benefit was more pronounced in subjects with HA-high tumors (extracellular matrix hyaluronan staining ≥50% of tumoral area), with a median PFS of 9.2 months with PAG versus 5.2 months with AG (HR=0.51; 95% CI, 0.26-1.00; P=0.048; FIG. 8B).

[0939] Progression-free survival (PFS) for subjects with HA-high tumors (extracellular matrix hyaluronan staining 50% of tumoral area) further was assessed in Stage 1 (ITT; n=47) versus Stage 2 (ITT; n=37) subjects. The improvement in PFS for the HA-high group was consistent regardless of study stage (FIGS. 9A and 9B). Median PFS in subjects with tumors with low levels of HA expression (i.e., HA expression in the ECM of <50% of the tumor surface area at any intensity) was not different between the treatment arms (5.6 months in the PAG arm versus 5.3 months in the AG arm; HR=0.88; 95% CI, 0.59-1.32).

[0940] The overall survival (OS) of subjects receiving PAG versus those receiving AG was assessed in the Stages 1 and 2 intent to treat (ITT) populations. The secondary endpoint of OS was similar between treatment arms in the overall study population (9.6 months in the PAG arm versus 9.2 months in the AG arm; HR=0.90; 95% CI, 0.68-1.19; FIG. 10A). There was a nonsignificant trend toward improved survival among subjects in the overall study population with HA-high tumors: median OS was 11.5 months in the PAG arm versus 8.5 months in the AG arm (HR=0.96; 95% CI, 0.57-1.61; FIG. 10B).

[0941] A trend toward OS benefit was observed for subjects with HA-high tumors in Stage 2 (FIG. 10C). This pattern was not seen for subjects in Stage 1 with HA-high tumors, although treatment was interrupted in many of these subjects (FIG. 10D). A significant OS benefit was observed in Stage 2 with PAG treatment in the ITT population (median 11.7 months PAG versus 9.7 months AG; HR=0.63; 95% CI, 0.41-0.98; P=0.04; FIG. 10E).

[0942] The ORR (primarily partial responses) was greater overall in subjects receiving PAG than in those receiving AG (40% versus 33%, respectively; P=0.23), and also by study stage, especially in subjects with HA-high tumors (45% versus 31%, respectively; P=0.24; Table 9). Among 61 subjects with HA-high tumors (37 in the PAG arm and 24 in the AG arm) who had at least one post-baseline tumor assessment, a substantial reduction in target lesion size was observed with PAG treatment (mean [standard deviation], 39.3 [25.3] for PAG versus 29.9 [23.4] for AG; P=0.15; FIG. 11). One subject with a HA-high tumor achieved a complete response with PAG treatment. Analyses based on HA-high threshold values other than 50% are less effective at identifying subjects responsive to treatment.

TABLE 9
Objective Response Rate by Study Stage

| | All Subjects | | | | HA-High | | | |
|---|---|---|---|---|---|---|---|---|
| Study Stage | PAG | | AG | | PAG | | AG | |
| Stage 1 | | | | | | | | |
| No. of subjects | 77 | | 69 | | 24 | | 23 | |
| ORR | | | | | | | | |
| No. (%) | 30 | (39) | 20 | (29) | 11 | (46) | 7 | (30) |
| Relative risk (95% CI) | 1.33 (0.84 to 2.12)* | | | | 1.47 (0.68 to 3.17)‡ | | | |
| DoR, months, median (95% CI) | 7.4 | (3.8 to 9.0) | 4.0 | (2.5 to 9.2) | 8.1 | (6.9 to NA) | 3.7 | (2.5 to NA) |
| Best response‡, No. (%) | | | | | | | | |
| Partial response | 29 | (38) | 20 | (29) | 10 | (42) | 7 | (30) |
| Complete response | 1 | (1) | 0 | | 1 | (4) | 0 | |
| Stable disease ≥6 weeks | 16 | (21) | 21 | (30) | 7 | (29) | 7 | (30) |
| Progressive disease | 7 | (9) | 8 | (12) | 0 | | 1 | (4) |
| Unknown/not evaluable | 24 | (31) | 20 | (29) | 6 | (25) | 8 | (35) |
| Stage 2 | | | | | | | | |
| No. of subjects | 89 | | 44 | | 25 | | 12 | |
| ORR | | | | | | | | |
| No. (%) | 37 | (42) | 17 | (39) | 11 | (44) | 4 | (33) |
| Relative risk (95% CI) | 1.07 (0.69 to 1.67)§ | | | | 1.35 (0.55 to 3.28)∥ | | | |
| DoR, months, median (95% CI) | 5.7 | (3.9 to 7.6) | 4.2 | (2.6 to NA) | 8.8 | (1.4 to NA) | NA | (NA) |
| Best response, No. (%) | | | | | | | | |
| Partial Response | 37 | (42) | 17 | (39) | 11 | (44) | 4 | (33) |
| Complete response | 0 | | 0 | | 0 | | 0 | |
| Stable disease ≥6 weeks | 28 | (32) | 12 | (27) | 8 | (32) | 3 | (25) |
| Progressive disease | 5 | (6) | 3 | (7) | 0 | | 1 | (8) |
| Unknown/not evaluable | 19 | (21) | 12 | (27) | 6 | (24) | 4 | (33) |

Abbreviations: AG, nab-paclitaxel plus gemcitabine; DoR, duration of response; HA, hyaluronan; HA-high, extracellular matrix hyaluronan staining ≥50% of tumoral area at any intensity; NA, not assessable; ORR, objective response rate; DoR, duration of response; PAG, PEGPH20 plus nab-paclitaxel plus gemcitabine.
*P = 0.22.
†P = 0.32.
‡Objective tumor response per RECIST v1.1 (central review).
§P = 0.76.
∥P = 0.50.

[0943] 3. Primary Safety Endpoint of TE Event Incidence

[0944] In Stage 1, 43% of subjects in the PAG arm experienced a TE event compared to 25% of subjects in the AG arm (P=0.03), and the events were primarily venous. The initiation of enoxaparin prophylaxis for all subjects in Stage 2 reduced the incidence of TE events in both arms (14% PAG versus 10% AG, P=0.77). Among subjects with enoxaparin prophylaxis at the recommended dose of 1 mg/kg/day, TE rates declined to 10% in the PAG arm and 6% in the AG arm (P=0.72). HA levels did not correlate with TE events and the reduction in TE events was consistent regardless of HA status. Arterial TE events in Stage 2 were limited to the AG arm and were not considered to be treatment-related. Enoxaparin prophylaxis did not increase bleeding risk: Similar rates were seen across treatment groups in Stage 2 (any-grade bleeding events, 36% in both treatment arms; grade ≥3 bleeding events, 4% in the PAG arm versus 8% in the AG arm).

### C. Conclusion

[0945] The data and results described herein for this Phase II study show that administering PAG treatment to patients with HA-high stromal tumors, such as PDAC, is more effective than administering the standard of care treatment (AG) to these patients; this is demonstrated by significant improvements in progression-free survival (PFS) and objective response rate (ORR), and a trend toward improved overall survival (OS).

[0946] These observations highlight the value of being able to select cancer patients who are most likely to benefit from a treatment regimen that includes PEGPH20. The selection of subjects for treatment with PEGPH20 based on tumor HA content, however, is limited by stringent requirements for tissue collection for the affinity histochemistry-based assay, and the paucity of suitable/available tumor tissues for sample collection. Liquid biopsies measuring circulating peptide markers can provide a less invasive and more widely applicable alternative for identifying/selecting subjects most likely to benefit from a cancer therapy regimen that includes PEGPH20.

### Example 10

### Preparation of an Exemplary Monoclonal Antibody that Specifically Binds to PRO-C3 (Released N-Terminal Propeptide of Type III Collagen (PIIINP))

[0947] Monoclonal antibodies that specifically bind to a neo-epitope of the biomarker Pro-C3 (neo-epitope of the C-terminal sequence of PIIINP) are known and their preparation detailed in the art (reproduced from U.S. Pat. No. 9,726,674). The amino acid sequence of the N-terminal propeptide of type III collagen (SEQ ID NO:227) was aligned among human, rat and mouse species and selected based on the homology among these species, and uniqueness among other ECM proteins by protein blasting. The neo-epitope C-terminal sequence CPTGPQNYSP-COOH (SEQ ID NO:216) in human PIIINP forms the N-protease cleavage of PIIINP from intact procollagen type III (amino acid residues 144 to 153 of type III collagen, see SEQ ID NO:227) at the Pro-Gln bond between amino acids P153-Q154 in human PIIINP; residues P154-Q155 in rodent PIIINP).The amino acid sequence 144′-CPTGPQNYSP-′153 (SEQ ID NO:216) in the al chain of PIIINP has 100% homology between human and rat. A polypeptide with this unique sequence was used to generate monoclonal antibodies.

[0948] Generation of monoclonal antibodies was initiated by subcutaneous immunization of 4-5 week old Balb/C mice with 200 μl emulsified antigen and 50 μg PIIINP neo-epitope C-terminal sequence linked to ovalbumin (OVA-CGG-CPTGPQNYSP (SEQ ID NO:220)) using Freund's incomplete adjuvant. Immunizations were repeated every 2 weeks until stable serum titer levels were reached. The mouse with the highest serum titer was selected for fusion. The mouse was rested for a month, and then boosted intravenously with 50 μg PIIINP neo-epitope C-terminal sequence in 100 μl 0.9% NaCl solution three days before isolation of the spleen. The spleen cells were fused with SP2/0 myeloma cells to produce a hybridoma, and cloned in culture dishes using the semi-medium method. The clones were plated into 96-well microtiter plates for further growth employing the limited dilution method to secure monoclonal growth. The supernatants were screened for reactivity against calibrator peptide and native material in an indirect ELISA using streptavidin-coated plates. Biotin-CGG-CPTGPQNYSP (SEQ ID NO:221 or 219) was used as screening peptide, while the free peptide CPTGPQNYSP (SEQ ID NO:216) was used as calibrator to test for further specificity of clones.

[0949] Clone Characterization

[0950] Native reactivity and affinity of the polypeptide were assessed using different body fluids, including urine, serum, and amniotic fluid (AF) from humans and rats in a preliminary ELISA using 2 ng/ml biotinylated peptide on streptavidin-coated microtiter plates and the supernatants from growing monoclonal hybridoma cells. Human AF was obtained from 30 women undergoing elective lower segment Caesarean sections at the Beijing Obstetrics Gynecology Hospital over a 2 month period. 100-200 ml AF was collected directly after incision and the fluid was stored at −20° C. until use (approved by the local ethical board, and prior written consent of the women). Rat AF was drawn from the uterus of pregnant Wistar rats two days prior to expected birth. Antibody specificity was tested in a preliminary assay using deselection and elongated peptides (i.e. calibrator peptide with ten amino acid substitutions and calibrator peptide with one additional amino acid at the cleavage site, respectively). The isotype of the monoclonal antibodies was determined using the Clonotyping System-HRP kit, cat. 5300-05 (Southern Biotech, Birmingham, Ala., USA).

[0951] Antibody Characterization

[0952] Prior to Western Blotting, the total protein concentration of human and rat AF was measured using the Bicinchoninic acid (BCA) Protein Assay according to manufacturer's instruction. BCA was diluted 2-fold in PBS from 2 mg/ml to produce a standard row for calculation of the samples. Samples were diluted 1:4 in 1× phosphate-buffered saline (PBS), and 25 μl sample was added to a microtiter plate along with 200 μl working reagent (Reagent A and B mixed in the ratio 50:1). The content was mixed on a plate shaker for 30 seconds followed by incubation for 30 minutes at 37° C. After incubation, the plate was cooled to room temperature, and the absorbance was measured in the ELISA reader at 562 nm (Molecular Devices, SpectraMax M, CA, USA). Each of rat and human AF was mixed with sample buffer (.times.2) and reducing agent (.times.10), heated at 70° C. for 10 minutes, loaded on a 4-20% tris-glycein sodium dodecyl sulfate-polyacrylamide gel electrophoresis (SDS-page), and run for 1 hour at 180V. Protein bands were blotted onto a nitrocellulose membrane using the Invitrogen i-Blot gel transfer system according to manufacturer's instruction. The membrane was blocked in blocking buffer (5% skimmed milk in Tris-buffered saline with Tween (TBST) overnight at 4° C., and incubated with 1 μg/ml horseradish peroxidase (HRP)-conjugated PIIINP neo-epitope (C-terminal sequence CPTGXQNYSP-COOH (SEQ ID NO:214)) specific monoclonal antibody designated NB61N-62 for 2 hours. Specificity of the PIIINP neo-epitope specific monoclonal antibody was demonstrated by addition of excess PIIINP neo-epitope calibrator peptide and antibody in the ratio 10:1 and allowed to pre-incubate for 1 hour before it was added to the membrane for overnight incubation. After incubation the membranes was washed 4.times.10 minutes in TBST, incubated with 4 ml chemiluminescence detection kit (ECL), and developed using Amersham Hyperfilm.

[0953] Clone Selection and Characterization

[0954] The subtype was determined to be an IgG1 subtype. From the Western Blot analysis it was seen that the PIIINP neo-epitope specific monoclonal antibody designated NB61N-62 recognized two bands with molecular sizes around 52-60 kDa in rat amniotic fluid, while only one band around 52 kDa was detected in human amniotic fluid. In addition, the signal could be partly inhibited by the selection peptide in the rat, and inhibited in human. Native reactivity was observed using the NB61N-62 antibody in the ELISA. Native reactivity was demonstrated against human serum, plasma, and AF as well as against rodent serum, plasma, and AF. The signal was slightly less inhibited against mouse serum and plasma. The signal of the competitive ELISA was inhibited using from 1:2 to 1:16, undiluted to 1:8, and undiluted to 1:4 in human, rodent, and mouse native material, respectively. Dilution of the native material followed approximately the same dilution pattern as the calibrator curve for all three species. Human AF inhibited the signal up to 100%; rat AF 80%; human serum and plasma and rat serum 70%; rat plasma 40%, and mouse serum and plasma 35%. Zero inhibition was observed using the elongated peptide (CPTGPQNYSPQ (SEQ ID NO:223)) and nonsense peptide (GSPGKDGVRG (SEQ ID NO:222)).

[0955] Assay Validation

[0956] Supernatant from the antibody producing hybridoma was collected and the monoclonal antibody was purified using HiTrap affinity columns (GE Healthcare Life Science, Little Chalfont, Buckinghamshire, UK), and labeled with HRP using Lightning-Link™ HRP Conjugation Kit (Innova Biosciences, Babraham, Cambridge, UK), according to the manufacturer's instructions. The Pro-C3 competitive ELISA procedure was as follows: A 96-well streptavidin-coated ELISA plate from Roche, cat.11940279, was coated with the biotinylated peptide Biotin-CGG-CPTGPQNYSP (SEQ ID NO:221 or 219) dissolved in coater buffer (50 mM PBS-BTE+10% sorbitol, pH 7.4), incubated for 30 min at 20.degree. C. in the dark and subsequently washed in washing buffer (20 mM Tris, 50 mM NaCl, pH 7.2). Thereafter 20 of peptide calibrator or sample were added to appropriate wells, followed by 100 of HRP-conjugated monoclonal antibody NB61N-62 dissolved in incubation buffer (50 mM PBS-BTB+10% LiquidII (Roche), pH 7.4) and the plate was incubated for 20 hours at 4° C., and washed. 100 μl tetramethylbenzinidine (TMB) (Kem-En-Tec cat.: 4380H) was added, the plate was incubated for 15 min at 20° C. in the dark and in order to stop the reaction, 100 μl of stopping solution (1% H₂SO₄) was added and the plate was analyzed in the ELISA reader at 450 nm with 650 nm as the reference (Molecular Devices, SpectraMax M, CA, USA). A calibration curve was plotted using a 4-parametric mathematical fit model.

[0957] Evaluation

[0958] A 2-fold dilution of healthy serum and plasma samples from human and rats were used to determine linearity and calculated as percentage of recovery of the 100% sample. Antibody specificity was calculated as percentage of recovery of the 100% calibrator peptide (CPTGPQNYSP (SEQ ID NO:216)), elongated peptide (CPTGPQNYSPQ (SEQ ID NO:223)), and non-sense peptide (GSPGKDGVRG (SEQ ID NO:222)). Lower limit of detection (LLOD) was calculated as the mean−3×Standard Deviation (SD) of the blank from 21 determinations of standard A (i.e. buffer). Upper limit of detection (ULOD) was determined as the mean−3×SD of 10 measurements of Standard. Lower limit of quantification (LLOQ) was determined as the lowest concentration reproducibly measured with a precision lower than 30%. The intra- and inter-assay variation was determined by 10 independent runs of 8 QC samples, with each run consisting of double determination of the samples. Accuracy of the samples was measured in healthy human serum samples spiked with standard curve or human amniotic fluid at significant concentrations and calculated as the percentage recovery of the theoretical amount of serum. Interference was measured in healthy human serum spiked with hemoglobin, lipemia, and biotin at significant concentrations and calculated as the percentage recovery of the theoretical amount of serum.

[0959] Results

[0960] The measurement range of the human Pro-C3 ELISA was determined by calculating ULOD and LLOQ providing a range from 0.867-60.1 ng/ml with a LLOD of 0.606 ng/ml. The technical performance of the Pro-C3 ELISA showed acceptable inter- and intra assay variation of mean 11.03% and 4.11%, with acceptance range below 15% and 10%, respectively Dilution recovery was performed using healthy serum and plasma samples from humans, rat and mouse. The dilution recovery was within the acceptable 100±0.20% recovery Further dilution resulted in measurements below LLOQ. Spiking of calibrator peptide in serum or plasma resulted in a mean recovery of 56% and 55%, respectively. Spiking of human AF in 2-fold dilution starting from 1:2 into healthy human serum or plasma resulted in mean recovery of 100% and 111%, respectively. No interference was observed in serum spiked with different concentrations of hemoglobin, biotin, and lipemia. The stability of the analyte was acceptable up to four freeze/thaw cycles with 100.+−0.20% recovery compared to 1 freeze/thaw cycle.

[0961] To determine the ratio of the binding affinity of the monoclonal antibody for the target sequence to the binding affinity of the monoclonal antibody for the elongated or shortened sequence, each of the sequences are synthesized and used as calibrator peptides in the Pro-C3 ELISA as described above. The resulting calibration curves are used to determine the IC₅₀ values of each sequence/antibody combination. The ratio of IC₅₀[target]/IC₅₀[elongated or shortened] defines the ratio of binding affinity.

### Example 11

### Exemplary Preparation of an Antibodies that Specifically Bind to C3M (MMP-9 Degradation Fragment of Type III Collagen) and Detection of KNGETGPQGP (SEQ ID NO:226) Collagen Type III Residues 610-619 (CO3-610C)

[0962] As described in U.S. Pat. Nos. 9,206,464 and 9,606,130, an antibody that specifically binds to a neo-epitope on C3M was been produced as follows Type III human collagen (Abcam, Cambridge, UK) was degraded in vitro by activated MMP-9 (Merck KGaA, Darmstadt, Germany) for 2 days. Degradation fragments were sequenced by LS-MS/MS and identified by a database search. The peptide with the sequence ⁶¹⁰KNGETGPQ (SEQ ID NO:232) was used for antibody production. The N-terminal of this sequence is residue 610 of human collagen type III. This synthetic peptide was conjugated to ovalbumin (OVA) prior to subcutaneous immunization of 4-6 week old Balb/C mice with about 200 μL emulsified antigen and 50 μg CO3-610C (KNGETGPQGPGGC (SEQ ID NO:233)-OVA). Consecutive immunizations were performed at two week intervals until stable sera titer levels were reached in Freund's incomplete adjuvant. The mice were bled from the second immunization on. At each bleeding, the serum titer was measured and the mouse with highest anti-serum titer was selected for fusion. After the fourth immunization, this mouse was rested for one month and then boosted intravenously with 50 mg CO3-610C in 100 μL 0.9% sodium chloride solution three days before isolation of the spleen for cell fusion.

[0963] Monoclonal antibody producing clones were selected using a) immunogenic peptide: KNGETGPQGP-GGC (SEQ ID NO:234)-Ovalbumin (OVA) (807678), b) screening peptide KNGETGPQGP-PG-K (SEQ I D NO: 235)-Biotin (807971), c) deselection peptides KDGETGAAGPPGK (SEQ ID NO:236)-Biotin (118318) representing a type II collagen alpha 1 chain, KDGEAGAQGPPGK(SEQ ID NO:237)-Biotin representing a type I collagen alpha 1 chain degradation product, purchased from the Chinese Peptide Company, Beijing, China. The ELISA coat plate was obtained from NUNC (Thermofisher, Copenhagen, Denmark). Peptide conjugation reagents and buffers were produced by Pierce (Thermofisher, Copenhagen, Denmark).

[0964] Buffer used for dissolving the coating peptide was composed of the following: 40 mM Na₂HPO₄, 12H₂O, 7 mM KH₂PO₄, 137 mM NaCl, 2.7 mM KCl, 25 mM EDTA, 0.1% Tween 20, 1% BSA, 10% sorbitol, pH 7. For a serum assay, buffer containing the following chemicals was used: 8 mM Na₂HPO₄ 12H₂O, 1.5 mM KH₂PO₄, 13.7 mM NaCl, 2.7 mM KCl, 0.1% Tween 20, 1% BSA, 0.003% phenol red, pH 7.4. A different buffer used for a urine assay contained 400 mM TRIZMA, 0.05% Tween 20, 0.1% BSA, 0.36% Bronidox L5, pH 8.0. For serum and urine assays washing buffer composed of 25 mM TRIZMA, 50 mM NaCl, 0.036% Bronidox L5, 0.1% Tween 20 were used, and reaction-stopping buffer composed of 0.1% H₂SO₄ ELISA-plates used for the assay development were Streptavidin-coated from Roche (Hvidovre, Denmark) cat.: 11940279. All ELISA plates were analyzed with the ELISA reader from Molecular Devices, SpectraMax M, (CA. USA).

[0965] The reagents, their concentrations and the incubation periods by performing several checkerboard analyses. A 96-well ELISA plate coated with streptavidin was further coated with 5 ng/ml of the synthetic peptide KNGETGPQGP (SEQ ID NO:226)-Biotinylated dissolved in PBS-TBE buffer at 20° C. for 30 minutes by constant shaking at 300 rpm. After washing with washing buffer, 20 μl of sample was added, followed by 100 μl of peroxidase conjugated anti-human mAb-NB51-32 CO₃-610C solution (23 pg/ml in incubation buffer). The plate was incubated for 1 hour at 20° C. during which time it was shaken at 300 rpm. This was followed by washing and finally, 100 μl tetramethylbenzinidine (TMB) (Kem-En-Tec cat.4380H) was dispensed and the plate incubated for 15 minutes in darkness and shaken at 300 rpm. In order to cease the reaction, 100 μl of stopping solution was added, and the plate analyzed in the ELISA reader at 450 nm with 650 nm as reference.

[0966] A standard curve was performed by serial dilution of the biotinylated antibody designated NB51-32 (biotinylated-NB51-32 CO3-610C antibody) was used for a serum assay, and biotinylated-NB51-134 CO3-610C antibody was used for a urine assay. Standard concentrations were 0, 0.33, 1, 3, 9, 27, 81 and 162 ng/ml. The fragments detected using the immunoassays so obtained was designated CO3-610C, corresponding to the N-terminal of the sequence KNGETGPQGP (SEQ ID NO:226), starting at amino acid reside 610 of the human collagen III.

[0967] A urine C3M ELISA was developed as follows: a 96-well plate pre-coated with streptavidin was further coated with 100 μL of 2.5 ng/mL synthetic peptide KNGETGPQGP-K-biotin dissolved in 10 mM PBS-BTB, pH 7.4, buffer at 20° C. for 30 min by constant shaking at 300 rpm. The plate was then washed five times in washing buffer. Thereafter, 20 μL of sample was added, followed by 100 μL of 18 ng/mL peroxidase-conjugated mAb-NB51-134 in 400 mM Tris-BTB, pH 8.0. The free peptide KNGETGPQGP (SEQ ID NO:226) was used as standard peptide at 100, 50, 25, 12.5, 6.25, 3.12, 1.56 and 0 ng/mL. The plate was incubated for 20 h at 4° C. by constant shaking at 300 rpm. The plate was again washed five times. Finally, 100 μL TMB (Kem-En-Tec) was dispensed and the plate incubated for 15 min in darkness and shaken at 300 rpm. One hundred microliter of stopping solution (0.1% H₂₅₀₄, Merck) were finally added and the plate analyzed in the ELISA reader at 450 nm with 650 nm as the reference. The urine C3M concentration was normalized for urine creatinine measured by the QuantiChrom Creatinine Assay Kit (Bioassay System).

### Example 12

### Assays for Measuring Extracellular Matrix (ECM) Biomarker Levels

[0968] The above Examples 1-9 demonstrate that PEGPH20 can improve therapeutic effectiveness of anti-tumor therapy for stromal barrier tumors, such as PDAC. The human clinical trials show that treatment with PAG improves survival outcomes, and that there are a subset of such subjects, i.e., those containing “HA-high” tumors, who are most likely to respond to PAG treatment. While the HA level in a tumor biopsy can be used, there are limitations as discussed in Example 9 above; liquid biopsies are less invasive and more efficient and convenient.

[0969] HA, collagens and proteoglycans are major constituents of the extracellular matrix (ECM). During pathological events, ECM turnover, i.e., the balance between the formation and the degradation of the ECM, is disturbed, leading to an altered composition of the ECM. The changes in collagen/proteoglycan turnover, which can be measured as degradation products in samples such as blood, plasma, serum, urine and other liquids from a subject, often mirror the effects of HA turnover because several of the collagens and proteoglycans of the ECM, or their degradation products, interact with HA and/or parallel the changes in HA in relation to pathological events such as tumor progression. These degradation products therefore can serve as liquid biomarkers for diagnosing/monitoring pathological events (and then administering treatments as appropriate). Among such liquid biomarkers are the following:
[0970] VCANM: MMP-12 degradation fragment of versican
[0971] C8-C: C-terminus of Type VIII collagen (vastatin)
[0972] Pro-C6: C-terminus of released C5 domain of Type VI collagen α3 chain (endotrophin)
[0973] C3M: MMP-9 degradation fragment of Type III collagen
[0974] Pro-C3: Released N-terminal propeptide of Type III collagen

[0975] Univariate and multivariate (ratio) analyses of the above biomarkers were performed on subjects from the Phase II clinical study (described in Example 9 above) to determine: (a) their prognostic value as determined by correlating biomarker levels with survival outcomes (PFS, ORR, OS); and (b) their predictive value for selecting patients most likely to benefit from treatment with PEGPH20, as measured by improved survival outcomes (PFS, ORR, OS). This example describes assays for each of the biomarkers. Example 13 describes a preliminary assessment of the prognostic and/or predictive value of these biomarkers. Example 13 shows that of several liquid biomarkers known to interact with HA and/or play a role that is parallel to that of HA in relation to pathological events, the ratio C3M/Pro-C3, which is the ratio of a marker representing degradation of Type III collagen (C3M) to a marker representing formation of Type III collagen (Pro-C3), i.e., a ratio representative of Type III collagen turnover, can be used to identify subjects for treatment with PAG. Example 14 describes an in-depth assessment of the levels and ratios of the C3M and Pro-C3 markers that have predictive value for treatment with PAG. Example 15 describes the selection of cutoff ratios of C3M/Pro-C3 that are lower than the median (50th percentile) and have predictive value for PAG treatment of a larger fraction of the subject population.

[0976] C3M Assay

[0977] The C3M competitive ELISA was performed in the manner originally developed and described by 13arascuk et al. (2010) Clin Biochem. 43:899-904.

[0978] Materials

| | | No. of | Volume | | | |
|---|---|---|---|---|---|---|
| Component | Description | units | (mL) | Dilution | Storage | |
| ^{1,3}Streptavidin | Microwell strips (12 × 8 wells) | 1 plate | — | Ready for | 2-8° | C. |
| coated | Pre-coated with streptavidin. | | | use | | |
| Microtitre Plate | Supplied in plastic frame | | | | | |
| ²Biotinylated | KNGETGPQGP-PG-K- | 1 bottle | 0.160 | 1 + 100 in | ≤−18° | C. |
| Antigen | Biotin in a PBS-buffered | | | Coating | | |
| (Coater) | solution containing protein | | | Buffer | | |
| | stabilizer and preservative | | | before use | | |
| ²Standard A | In Incubation Buffer. The | 1 bottle | — | Reconstitute | ≤−18° | C. |
| (STDA) | standard curve is prepared | | | in 500 μl | | |
| | from Standard A | | | distilled | | |
| | (KNGETGPQGP) diluted 2- | | | water | | |
| | fold in Incubation Buffer | | | | | |
| ²Control 1 | Containing peptide | 1 bottle | — | Reconstitute | ≤−18° | C. |
| (CO1) | KNGETGPQGP in | | | in 500 μl | | |
| | Incubation Buffer at a | | | distilled | | |
| | predetermined low | | | water | | |
| | concentration | | | | | |
| ²Control 2 | Containing peptide | 1 bottle | — | Reconstitute | ≤−18° | C. |
| (CO2) | KDGETGPQGP in | | | in 500 μl | | |
| | Incubation Buffer at a | | | distilled | | |
| | predetermined high | | | water | | |
| | concentration | | | | | |
| ²Horseradish | Monoclonal antibody NB51- | 1 bottle | 0.160 | 1 + 100 in | ≤−18° | C. |
| Peroxidase | 278-32 conjugated to HRP | | | Incubation | | |
| Conjugated | and stored in a protein | | | Buffer | | |
| Antibody | stabilizer buffer | | | before use | | |
| (HRP-Ab) | | | | | | |
| ¹Coating Buffer | PBS Buffered solution | 1 bottle | 15 | Ready for | 2-8° | C. |
| | containing protein stabilizer | | | use | | |
| | and preservative | | | | | |
| ¹Incubation | Tris-buffered solution | 1 bottle | 20 | Ready for | 2-8° | C. |
| Buffer | containing protein stabilizer | | | use | | |
| | and preservation | | | | | |
| ¹Washing | Concentrated Washing | 1 bottle | 15 | 1 + 50 in | 2-8° | C. |
| Solution | Solution with detergent and | | | distilled | | |
| | preservative | | | water | | |
| ^{1,4}Substrate | Tetramethylbenzidine (TMB) | 1 bottle | 15 | Ready for | 2-8° | C. |
| Solution | substrate in an acidic buffer | | | use | | |
| (TMB) | | | | | | |
| ¹Stopping | 0.18 mol/L Sulphuric Acid | 1 bottle | 15 | Ready for | 2-8° | C. |
| Solution | | | | use | | |

¹Components were stored at 2-8° C. until the expiry date.
²Components were stored at ≤−18° C. until the expiry date. The components can be thawed and refrozen once. Reagents can be stored up to 20° C. for 1 week. Diluted HRP-Ab and Coater solutions cannot be stored.
³Roche cat.: 11940279.
⁴Kem-En-Tec cat. 438OH.

[0979] The materials listed above for the C3M ELISA assay are commercially available as a kit sold by Nordic Biosciences, Denmark (“C3M ELISA,” Catalog No. 1200-01).

[0980] Methods

[0981] A. Preparation of the Immunogenic Peptide

[0982] The peptide KNGETGPQGP (SEQ ID NO:226) was used as the antigen representing an MMP-9 degradation product of Type III collagen (i.e., C3M). The immunogenic peptide was generated by conjugation with ovalbumin (OVA), using a cysteine containing derivative of the antigen that has one free —SH group: KNGETGPQGP-GGC (SEQ ID NO:233). Peptide conjugation was performed using the Maleimide Activated Immunogen Conjugation Kit (Sigma-Aldrich, MO, USA). 400 μl of a 5 mg/ml solution of KNGETGPQGP-GGC (SEQ ID NO:233) was mixed in conjugation buffer with maleimide-activated OVA (180 μl of a 10 mg/ml solution of OVA). The mixture was incubated at room temperature for 2 hours. Conjugated products were cleared of EDTA and sodium azide by desalting or dialysis.

[0983] B. Preparation of Biotinylated Peptides

[0984] The screening peptide (C3M: KNGETGPQGP (SEQ ID NO:226)) and peptides designed to test specificity of the monoclonal antibodies for the C3M neo-epitope: (1) PGKNGETGPQGP (SEQ ID NO:230), an elongated peptide, and (2) deselection peptides KDGETGAAGP (SEQ ID NO:258), representing a Type II collagen alpha 1 chain degradation product, and KDGEAGAQGP (SEQ ID NO:260), representing a Type 1 collagen alpha 1 chain degradation product, were biotinylated by incorporating biotin-conjugated lysine into the solid-phase peptide synthesis. The resulting biotinylated peptides are as follows: KNGETGPQGP-PG-K-Biotin (screening peptide) (SEQ ID NO:235), PGKNGETGPQGP-K-Biotin (elongated peptide) (SEQ ID NO:259), KDGETGAAGP-PG-K Biotin (deselection peptide) (SEQ ID NO:236) and KDGEAGAQGP-PG-K-Biotin (deselection peptide) (SEQ ID NO:237).

[0985] C. Generation of Monoclonal Antibodies

[0986] 4-6 week old Balb/C mice were immunized subcutaneously with 50 immunogenic peptide in Freund's incomplete adjuvant. Consecutive immunizations were performed at 2-week intervals until stable sera titer levels were reached. The mice were bled from the second immunization onward and at each bleeding, the serum titer was measured and the mouse with the highest serum titer was selected for fusion. After the fourth immunization, the selected mouse was rested for one month and then boosted intravenously with 50 μg immunogenic peptide in 1000 μl 0.9% NaCl solution 3 days before isolation of the spleen for cell fusion.

[0987] Fusion was performed as previously described (Gefter et al., Somatic Cell Genet. 3:231-236 (1977)); SP2/0 myeloma cells were used for fusion with the mouse spleen cells. The fusion cells were cloned in 35 mm cell culture dishes by the semi-solid medium method and the dishes were incubated in a CO₂ incubator. The clones were then plated into sixteen 96-well microtiter plates. Screening was carried out three days later.

[0988] D. Screening of Monoclonal Antibodies

[0989] Supernatants from the microtiter plates were screened using an indirect ELISA. Biotinylated C3M: KNGETGPQGP-PG-K- (SEQ ID NO:235)-Biotin served as the screening peptide, PGKNGETGPQGP-K-Biotin (SEQ ID NO:259) as the elongation peptide and (KDGETGAAGPPG-K-Biotin (SEQ ID NO:236)) and (KDGEAGAQGPPGK(SEQ ID NO:237)-Biotin) as deselection peptides. Cell lines producing monoclonal antibodies specific to the screening peptide and without cross-reaction to the elongation peptide or deselection peptides were selected for use in assays.

[0990] E. Assay Validation

[0991] For each of the monoclonal antibodies tested, a standard curve was generated using serially diluted biotinylated screening peptide (concentrations: 0, 0.33, 1, 3, 9, 27, 81 and 162 ng/ml). A calibration curve was plotted using a 4-parametric mathematical fit model. Serum samples from healthy human volunteers between 23-50 years of age were assayed. The positive control used in the assays was Type III collagen cleaved in vitro using purified MMP-9, to generate a known amount of C3M. An in vitro cleavage product of Type II collagen using purified MMP-9 also was obtained, to test for cross-reactivity of the antibodies with Type II collagen. In addition, bovine serum samples were tested to determine the level of interspecies cross reactivity.

[0992] The monoclonal antibody with the best native reactivity, affinity and stability in the assay was determined to be NB51-278-32. Close to 100% of the C3M neo-epitope could be recovered from both human and bovine serum samples by back-calculation from samples diluted 1:5, 1:10 or 1:20. The NB51-278-32 antibody was not cross-reactive toward intact or MMP-9 degraded Type II collagen. In addition, the antibody showed no cross-reactivity toward intact Type III collagen; it was found to be specific for the C3M neo-epitope. The lowest limit of analyte (C3M) detection in the assay was found to be 0.5 ng/ml.

[0993] F. C3M Competitive ELISA of Samples from Phase II Clinical Study

[0994] Prior to use, all solutions were equilibrated to room temperature. The assay was performed at room temperature (18-22° C.). All reagents and samples were mixed before use to avoid the formation of foam. All samples were measured in duplicates.

[0995] 1. Preparation of Standard a and Controls

[0996] Standard A and Controls (CO1 and CO2) were reconstituted in 500 μL distilled water and left for 10 minutes at room temperature. The controls contained the Standard A peptide (KNGETGPQGP (SEQ ID NO:226)) in incubation-buffer at low (CO1) and high (CO2) concentration to ascertain that their concentration values were obtained within pre-defined limits/range when quantified from the corresponding standard curve (to verify the integrity of the kit components).

[0997] 2. Preparation of Biotinylated Antigen Solution

[0998] The Biotinylated Antigen (Coater) was mixed with 47 mM PBS-BTE+10% sorbitol, pH 7.0 Coating Buffer (1:100) in a 15 mL tube, resulting in a 5 ng/mL solution of antigen.

[0999] 3. Coating with Biotinylated Antigen Solution

[1000] 100 μL of Biotinylated Antigen Solution was added to each well of the streptavidin-coated 96-well ELISA plate. The plate was covered with sealing tape and incubated for 30±5 minutes at room temperature (18-22° C.) for 1 hour on a microtitre plate mixing apparatus set to 300 rpm.

[1001] 4. Washing

[1002] The wells were washed 5 times manually or with an automated plate washer with Washing Solution (300 μL Washing Solution per well). The Washing Solution contained 25 mM TRIZMA, 50 mM NaCl, 0.036% Bronidox L5 and 0.1% Tween 20.

[1003] 5. Standard Curve

[1004] Standards A-J were prepared by serial 2-fold dilution, beginning with Standard A, in Incubation Buffer (50 mM TRIS-BTB+0.003% phenol red, pH 7.4). The negative control was Standard K (buffer alone).

[1005] 6. Preparation of Horseradish-Peroxidase Conjugated Antibody Solution

[1006] The Horseradish-Peroxidase Conjugated Antibody (HRP-Ab), NB51-278-32 conjugated to peroxidase, was mixed with Incubation Buffer (1:100) in a 15 mL tube, without vortexing.

[1007] 7. Incubation with Standards, Controls and Samples

[1008] Blinded plasma-EDTA samples from the Phase II clinical study (see Example 9) were diluted 1:3 in Incubation Buffer in dilution plates. 20 μL of standard, controls, or plasma-EDTA samples were added into appropriate wells in duplicate. 100 μL of the HRP-Ab solution (23 pg/mL final concentration) was then added to each well. The plate was covered with sealing tape and incubated while shaking (mixing apparatus, 300 rpm) for 1 hour±5 minutes at 18-22° C.

[1009] 8. Washing

[1010] Washing was performed as described in Step 4 above.

[1011] 9. Incubation with Substrate Solution (TMB)

[1012] 100 μL of the Substrate Solution (TMB) was added into each well, covered with sealing tape and incubated for 15±2 minutes at room temperature (18-22° C.) in the dark on a mixing apparatus with shaking at 300 rpm.

[1013] 10. Stopping of Color Reaction

[1014] 100 μL of the Stopping Solution was added into each well.

[1015] 11. Measurement of Absorbance

[1016] The absorbance was measured in the ELISA reader within 30 minutes of stopping the reactions. The absorbance measurement wavelength was 450 nm, with 650 nm as reference.

[1017] 12. Determination of Analyte (C3M) Concentration

[1018] The mean of the duplicate absorbance determinations was calculated. A standard curve was constructed using a 4-parametric fit model with mean absorbance of the 11 Standards A-K (ordinate) against the corresponding control and plasma-EDTA sample C3M concentrations (abscissa). The C3M analyte concentration of the controls and each sample was determined by interpolation. As the blinded plasma-EDTA samples were diluted 1:3 prior to assessment, the interpolation of C3M was multiplied by four (×4) to give the actual value of the analyte in the plasma-EDTA sample. This adjusted mean value was used in all subsequent data analyses. The measurement range was determined as 4.0-88.0 ng/mL (corrected for pre-dilution, 1:3). Samples containing C3M concentration >88.0 ng/mL (corrected 1:3 for pre-dilution) were additionally diluted in Incubation Buffer and re-tested. Samples containing C3M concentration <4.0 ng/mL (corrected 1:3 for pre-dilution) were assigned the lower limit of quantitation (LLOQ) value of 4.0 ng/ml. The optical density (OD) of STD K (Incubation Buffer) was determined as being in the range 1.50-2.30 Abs.

[1019] PRO-C3 Assay

[1020] The Pro-C3 competitive ELISA was originally developed and described by Nielsen M et al. (2013) Am J Transl Res. 5:303-315.

[1021] Materials

| | | No. of | Volume | | |
|---|---|---|---|---|---|
| Component | Description | units | (mL) | Dilution | Storage |
| ^{1,3}Streptavidin | Microwell strips (12 × 8 wells) | 1 plate | — | Ready for | 2-8° C. |
| coated Microtitre | Pre-coated with streptavidin. | | | use | |
| Plate | Supplied in plastic frame | | | | |
| ²Biotinylated | Biotin-CGG-CPTGPQNYSP in | 1 bottle | — | Reconstitute | 2-8° C. |
| Antigen (Coater) | a PBS-buffered solution | | | in 500 μl | |
| | containing protein stabilizer and | | | distilled | |
| | preservative. | | | water | |
| | | | | 1 + 100 in | |
| | | | | Coating | |
| | | | | Buffer | |
| | | | | before use | |
| ²Standard A | In Incubation Buffer⁴. The | 1 bottle | — | Reconstitute | 2-8° C. |
| (STDA) | standard curve is prepared from | | | in 500 μl | |
| | Standard A (CPTGPQNYSP) | | | distilled | |
| | diluted 2-fold in Incubation | | | water | |
| | Buffer. | | | | |
| ²Control 1 (CO1) | Containing peptide | 1 bottle | — | Reconstitute | 2-8° C. |
| | CPTGPQNYSP at a | | | in 500 μl | |
| | predetermined low | | | distilled | |
| | concentration in Incubation | | | water | |
| | Buffer | | | | |
| ²Control 2 (CO2) | Containing peptide | 1 bottle | — | Reconstitute | 2-8° C. |
| | CPTGPQNYSP at a | | | in 500 μl | |
| | predetermined high | | | distilled | |
| | concentration in Incubation | | | water | |
| | Buffer | | | | |
| ²Horseradish | Monoclonal antibody NB61N- | 1 bottle | 0.160 | 1 + 100 in | ≤−18° C. |
| Peroxidase | 62 conjugated to HRP and | | | Incubation | |
| Conjugated | stored in a protein stabilizer | | | Buffer | |
| Antibody (HRP- | buffer | | | before use | |
| Ab) | | | | | |
| ¹Coating Buffer | PBS buffered solution | 1 bottle | 15 | Ready for | 2-8° C. |
| | containing protein stabilizer and | | | use | |
| | preservative | | | | |
| ¹Incubation Buffer | PBS buffered solution | 1 bottle | 20 | Ready for | 2-8° C. |
| | containing protein stabilizer and | | | use | |
| | preservative | | | | |
| ¹Washing | Concentrated Washing Solution | 1 bottle | 15 | 1 + 50 in | 2-8° C. |
| Solution | with detergent and preservative | | | distilled | |
| | | | | water | |
| ^{1,4}Substrate | Tetramethylbenzidine (TMB) | 1 bottle | 15 | Ready for | 2-8° C. |
| Solution (TMB) | substrate in an acidic buffer | | | use | |
| ¹Stopping | 0.18 mol/L Sulphuric Acid | 1 bottle | 15 | Ready for | 2-8° C. |
| Solution | | | | use | |

¹Components stored at 2-8° C. until expiry date.
²Components stored at ≤−18° C. until expiry date. The components can be thawed and refrozen once. Reagents can be stored up to 20° C. for 1 week. Diluted HRP-Ab and Coater solutions cannot be stored.
³Roche cat.: 11940279.
⁴Kem-En-Tec cat. 438OH.

[1022] The materials listed above for the Pro-C3 ELISA assay are commercially available as a kit sold by Nordic Biosciences, Denmark (“Pro-C3 ELISA,” Catalog No. 1700).

[1023] Methods

[1024] A. Peptides

[1025] The peptide CPTGPQNYSP (SEQ ID NO:216) was used as the antigen sequence (neo-epitope) of Pro-C3. An immunogenic peptide was generated by conjugation of a peptide containing the neo-epitope with ovalbumin (OVA), as follows: (OVA)-CGG-CPTGPQNYSP (SEQ ID NO:220). Biotin-CGG-CPTGPQNYSP (SEQ ID NO:221 or 219) was used as the screening peptide, while the free peptide CPTGPQNYSP (SEQ ID NO:216) was used as calibrator to test for the further specificity of clones. Antibody specificity was calculated as percentage recovery of the calibrator peptide, the elongated peptide (CPTGPQNYSPQ (SEQ ID NO:223)) and non-sense peptide (GSPGKDGVRG (SEQ ID NO:222)). All synthetic peptides were purchased from the Chinese Peptide Company, Beijing, China.

[1026] B. Generation of Monoclonal Antibodies

[1027] 4-5 week old Balb/C mice were immunized subcutaneously with 50 immunogenic peptide in Freund's incomplete adjuvant. Consecutive immunizations were performed at 2-week intervals until stable sera titer levels were reached. The mouse with the highest serum titer was selected for fusion. The selected mouse was rested for one month and then boosted intravenously with 50 μg immunogenic peptide in 100 μl 0.9% NaCl solution 3 days before isolation of the spleen for cell fusion.

[1028] Fusion was performed as previously described (Gefter et al., Somatic Cell Genet. 3:231-236 (1977)); SP2/0 myeloma cells were used for fusion with the mouse spleen cells to produce hybridomas, cloned in 35 mm cell culture dishes by the semi-solid medium method and the dishes were incubated in a CO₂ incubator. The clones were then plated into sixteen 96-well microtiter plates for further growth, employing the limited dilution method to secure monoclonal growth.

[1029] C. Screening of Monoclonal Antibodies

[1030] Supernatants from the microtiter plates were screened against calibrator peptide and native material in an indirect ELISA. Native reactivity and affinity of the peptide were tested using different biological biological materials such as urine, serum and amniotic fluid (AF) from both humans and rats in a preliminary ELISA using 2 ng/ml biotinylated calibrator peptide (i.e., screening peptide). The isotype of the monoclonal antibodies was determined using the Clonotyping System-HRP kit, Cat. 5300-05 (Southern Biotech, Birmingham, Ala., USA). Antibody specificity was tested using the elongated peptide and deselection/non-sense peptide. The monoclonal antibody with the best native reactivity, affinity and stability in the assay was determined to be NB61N-62. The subtype of the antibody was determined to be an IgG1 subtype. Western Blot analysis showed that the NB61N-62 antibody recognized two bands with molecular sizes around 52-60 kDa in ratAF and one band around 52 kDa in human AF. The signal was partly inhibited in rat AF and almost completely inhibited in human AF by adding calibrator peptide.

[1031] D. Assay Validation

[1032] A standard curve was generated using 2-fold serial dilutions, beginning at 76.31 ng/ml, of calibrator peptide, elongated peptide and non-sense peptide, in a competitive ELISA using a 96-well streptavidin coated ELISA plate further coated with the biotinylated peptide Biotin-CGG-CPTGPQNYSP (SEQ ID NO:221 or 219). A calibration curve was plotted using an Optical density at 450 nm, with background subtracted at 650 nm, was measured as a function of competitor peptide (calibrator, elongated or non-sense) concentration. No inhibition was observed with the elongated and non-sense peptides. The lowest limit of analyte (Pro-C3) detection in the assay was found to be 0.606 ng/ml.

[1033] Native reactivity of the NB61N-62 antibody was observed towards human serum, plasma and AF as well as rodent serum, plasma and AF. The signal of the competitive ELISA was inhibited using from 1:2 to 1:16 diluted, from undiluted to 1:8 diluted or from undiluted to 1:4 diluted human, rodent or mouse native material, respectively. Dilution of the native material followed approximately the same dilution pattern as the calibrator curve for all three species. Human AF inhibited the signal up to 100%. Inhibition was 80% for rat AF, 70% for human serum, 44% for rat plasma and 35% for mouse serum and plasma. The technical performance of the Pro-C3 ELISA showed acceptable inter and intra assay variation of mean 11.03% and 4.11%, respectively, with acceptance range below 15% and 10%, respectively.

[1034] Dilution recovery was performed using healthy serum and plasma samples from humans, rats and mice. The dilution recovery was within the acceptable range of 100+/−20%. Spiking of calibrator peptide in serum or plasma resulted in a mean recovery of 56% and 55%, respectively. Spiking of human AF in serial 2-fold dilutions of between 1:2 to 1:64 into healthy human serum or plasma resulted in mean recovery of 100% and 111%, respectively. No interference was observed in serum spiked with hemoglobin, biotin or lipemia. The stability of the analyte was acceptable for up to four freeze/thaw cycles, with 100+/−20% recovery compared to analyte subjected to a single freeze/thaw cycle.

[1035] E. Pro-C3 Competitive ELISA of Phase II Clinical Study Samples

[1036] Prior to use, all solutions were equilibrated to room temperature. The assay was performed at room temperature (18-22° C.). All reagents and samples were mixed before use avoiding formation of foam. All samples were measured in duplicates.

[1037] 1. Dilution of Reagents

[1038] The biotinylated Antigen, Standard A, HRP-Ab, CO₁ and CO₂ were reconstituted with 0.500 mL distilled water and allowed to stand for 10 minutes at room temperature. The controls contained the Standard A peptide (CPTGPQNYSP (SEQ ID NO:216)) in incubation-buffer at low (CO1) and high (CO2) concentration to ascertain that their concentration values were obtained within pre-defined limits/range when quantified from the corresponding standard curve (to verify the integrity of the kit components).

[1039] 2. Preparation of Biotinylated Antigen Solution

[1040] The Biotinylated Antigen (Coater) was mixed with 47 mM PBS-BTE+10% sorbitol, pH 7.0 Coating Buffer (1:100) in a 15 mL tube, resulting in a 5 ng/mL solution of antigen.

[1041] 3. Coating with Biotinylated Antigen Solution

[1042] 100 μL of Biotinylated Antigen Solution was added to each well of the streptavidin-coated 96-well ELISA plate. The plate was covered with sealing tape and incubated for 30±5 minutes at room temperature (18-22° C.) for 1 hour on a microtitre plate mixing apparatus set to 300 rpm.

[1043] 4. Washing

[1044] The wells were washed 5 times manually or with an automated plate washer with Washing Solution (300 μL Washing Solution per well). The Washing Solution contained 25 mM TRIZMA, 50 mM NaCl, 0.036% Bronidox L5 and 0.1% Tween 20.

[1045] 5. Standard Curve

[1046] The standards (A-G; beginning with Standard A solution, serially diluted 2-fold through to G; Standard H=Incubation Buffer alone) were prepared by serial 2-fold dilution in Incubation Buffer (50 mM TRIS-BTB+0.003% phenol red, pH 7.4).

[1047] 6. Preparation of Horseradish-Peroxidase Conjugated Antibody Solution

[1048] The Horseradish-Peroxidase Conjugated Antibody (HRP-Ab), monoclonal antibody NB61N-62 conjugated to peroxidase, was mixed with Incubation Buffer (1:100) in a 15 mL tube, without vortexing.

[1049] 7. Incubation with Standards, Controls and Samples

[1050] Blinded plasma-EDTA samples were diluted 1:3 in Incubation Buffer in dilution plates. 20 μL of standard, controls, or plasma-EDTA samples were added into appropriate wells in duplicate. 100 μL of the HRP-Ab solution (23 pg/mL final concentration) was then added to each well. The plate was covered with sealing tape and incubated while shaking (mixing apparatus, 300 rpm) for 20 hours±1 hour at 2-8° C.

[1051] 8. Washing

[1052] Washing was performed as described in Step 4 above.

[1053] 9. Incubation with Substrate Solution (TMB)

[1054] 100 μL of the Substrate Solution (TMB) was added into each well, covered with sealing tape and incubated for 15±2 minutes at room temperature (18-22° C.) in the dark on a mixing apparatus with shaking at 300 rpm.

[1055] 10. Stopping of Color Reaction

[1056] 100 μL of the Stopping Solution was added into each well.

[1057] 11. Measurement of Absorbance

[1058] The absorbance was measured in the ELISA reader within 30 minutes of stopping the reactions. The absorbance measurement wavelength was 450 nm, with 650 nm as reference.

[1059] 12. Determination of Analyte (Pro-C3) Concentration

[1060] The mean of the duplicate absorbance determinations was calculated. A standard curve was constructed using a 4-parametric fit model with mean absorbance of the 8 Standards A-H (ordinate) against the corresponding control and plasma-EDTA sample Pro-C3 concentrations (abscissa). The Pro-C3 analyte concentration of the controls and each sample was determined by interpolation. As the blinded plasma-EDTA samples were diluted 1:1 prior to assessment, the interpolation of C3M was multiplied by two (×2) to give the actual value of the analyte in the plasma-EDTA sample. This adjusted mean value was used in all subsequent data analyses.

[1061] The measurement range was determined as 4.0-88.0 ng/mL (corrected for pre-dilution, 1:3). Samples containing Pro-C3 concentration >116.0 ng/mL (corrected 1:1 for pre-dilution) were additionally diluted in Incubation Buffer and re-tested. Samples containing Pro-C3 concentration <4.0 ng/mL (corrected 1:1 for pre-dilution) were assigned the lower limit of quantitation (LLOQ) value of 2.6 ng/ml. The optical density (OD) of STD H (Incubation Buffer) was determined as being in the range 1.50-2.30 Abs.

[1062] VCANM Assay

[1063] The VCANM competitive ELISA was originally developed and described by Barascuk (2013) Int. J. Clin. Exp. Med. 6:174-184. The methodology essentially was similar to the competitive ELISA assays for C3M and Pro-C3, as detailed above. Certain particular details regarding the neo-epitope and antibody are as follows:

[1064] A. Peptides

[1065] The peptide KTFGKMKPRY (SEQ ID NO:239) was used as the antigen sequence (neo-epitope) of VCANM. An immunogenic peptide was generated by conjugation of a peptide containing the neo-epitope with ovalbumin (OVA), as follows: (OVA)-CGG-KTFGKMKPRY (SEQ ID NO:270). KTFGKMKPRY-K-Biotin (SEQ ID NO:271) was used as the screening peptide, while the free peptide KTFGKMKPRY (SEQ ID NO:239) was used as calibrator/standard to test for the further specificity of clones. AKTFGKMKPRY (SEQ ID NO:272) was used as the elongated peptide. All synthetic peptides were purchased from the Chinese Peptide Company, Beijing, China.

[1066] B. Generation of Monoclonal Antibodies

[1067] The monoclonal antibodies were generated as described above for C3M and Pro-C3, using the immunogenic peptide for VCANM.

[1068] C. Screening of Monoclonal Antibodies

[1069] Screening of the antibodies was performed as described above for C3M and Pro-C3, using biotinylated VCANM neo-epitope as the screening peptide. The antibody NB158-8B2 raised against the VCANM antigen was chosen for competitive ELISA development, on the basis of best native reactivity, affinity and stability.

[1070] Immunohistochemical staining of the human arterial left anterior descending (LAD) coronary artery from two deceased individuals with different severity of atherosclerosis was performed using the NB158-8B2 monoclonal anti-VCANM antibody. The versican neo-epitope is present in these specimens of atherosclerotic patients, with specific localization at the plaque level, towards the edges of the atherosclerotic plaque; the staining was localized to these regions.

[1071] D. Assay Validation

[1072] Assay validation was performed in a manner similar to that described for C3M and Pro-C3 above. The VCANM antibody NB158-8B2 was found to be specific to in vitro cleaved versican, with preference to MMP-12 digestion. No inhibition of the signal was observed in samples containing either the elongated peptide or intact versican. The specificity for the neo-epitope also was tested using the extracted extracellular chondroitin sulfate proteoglycans from chicken brain cleaved for 7 days at 37° C. with MMP-8, MMP-12 or Cathepsin K as sample.

[1073] The assay showed good technical performances: the lowest detection limit (LDL) was 0.38 ng/ml, dilution recovery for samples diluted 1:2 and 1:4 to undiluted sample was within 100%±10%, and the mean intra- and inter assay variations were 6.98% and 6.65% respectively, both below the recommended 10%.

[1074] E. VCANM Competitive ELISA of Phase II Clinical Study Samples

[1075] The competitive ELISA was performed in the manner described above for C3M and Pro-C3. A 96-well streptavidin pre-coated plate was coated with 2.5 ng/mL of the biotinylated synthetic peptide, KTFGKMKPRY-K-Biotin (SEQ ID NO:271), dissolved in PBS-BTB buffer (2 mM KH₂PO₄, 9 mM Na₂HPO₄, 2H2O, 3 mM KCl, 137 mM NaCl, pH 7.4) and incubated for 30 minutes at 20° C. 20 μL of the peptide calibrator or plasma-EDTA sample were added to appropriate wells, followed by 100 μL of 20 ng/ml HRP-conjugated mAb, and incubated for 1 hour at 20° C. Finally, 100 μL tetramethyl benzidine (TMB) developer (Kem-En-Tec cat.4380H, Taastrup, Denmark) was added, and the plate was incubated for 15 minutes at 20° C. in the dark. All the above incubation steps included shaking at 300 rpm. After each incubation step, the plate was washed five times in washing buffer (20 mM Tris, 50 mM NaCl, pH 7.2). The TMB reaction was stopped by adding 100 μL of stopping solution (1% HCl) and measured at 450 nm with 650 nm as the reference. A standard calibration curve was plotted using a 4-parametric mathematical fit model with a starting concentration of 10 ng/mL of the standard peptide following a 2-fold serial dilution and the last standard was a zero standard. Prior to use, all solutions were equilibrated to room temperature. The assay was performed at room temperature (18-22° C.). All reagents and samples were mixed before use avoiding formation of foam. All samples were measured in duplicates.

[1076] Pro-C6 Assay

[1077] The Pro-C6 competitive ELISA was originally developed and described by Sun et al. ((2015) PloS One 10 (12):e0144525). The methodology essentially was similar to the competitive ELISA assays for C3M and Pro-C3, as detailed above. Certain particular details regarding the neo-epitope and antibody are as follows:

[1078] A. Peptides

[1079] The last 10 amino acids of the collagen type VI α3 chain, KPGVISVMGT (SEQ ID NO:238), was used as the antigenic neo-epitope. An immunogenic peptide was generated by conjugation of a peptide containing the neo-epitope with ovalbumin (OVA), as follows: (OVA)-CGG-KPGVISVMGT (SEQ ID NO:262). KPGVISVMGT-K-Biotin (SEQ ID NO:263) was used as the screening peptide, while the elongated peptide KPGVISVMGTA (SEQ ID NO:261) and the truncated peptide KPGVISVMG (SEQ ID NO:264) were used as the non-specific negative controls to test for specificity of the monoclonal antibody clones. Cell lines specific to the selection peptide and without cross-reactivity to either elongated peptide or truncated peptide were selected and sub-cloned. The antibodies were purified using an IgG column.

[1080] But for the truncated peptide, which was purchased from the American Peptide Company, Sunnyvale, USA, all synthetic peptides were purchased from the Chinese Peptide Company, Beijing, China.

[1081] B. Generation of Monoclonal Antibodies

[1082] The monoclonal antibodies were generated as described above for C3M and Pro-C3, using the immunogenic peptide for Pro-C6.

[1083] C. Screening of Monoclonal Antibodies

[1084] Screening of the antibodies was performed as described above for C3M and Pro-C3, using biotinylated Pro-C6 neo-epitope as the screening peptide. The antibody 10A3 raised against the Pro-C6 antigen was chosen for competitive ELISA development, on the basis of best native reactivity, affinity and stability. Native reactivity of the chosen antibody was assessed using human serum pool and human amniotic fluid pool. In the competitive ELISA, the signals were partly inhibited by both serum and amniotic fluid. Western blot analysis showed that the antibody recognized a band around 10 kD in a signal which was completely blocked in the presence of the standard peptide.

[1085] D. Assay Validation

[1086] Assay validation was performed in a manner similar to that described for C3M and Pro-C3 above. The Pro-C6 antibody, 10A3, specifically recognized the neo-epitope (standard peptide) and not the elongated and truncated peptides. No inhibition of the signal was observed in samples containing either the elongated peptide or intact versican.

[1087] The measurement range of the Pro-C6 competitive ELISA was determined using a range of standard peptide concentrations from 0.15 ng/ml (lower limit of detection, LLOD) to 58.39 ng/ml (upper limit of detection, ULOD). The inter- and intra-assay variability were in the acceptable range and found to be 15.2% and 4.8%, respectively. The dilution recovery in human serum and heparin plasma were both within the acceptable range of 100±20%. The correlations between values in human serum and three kinds of plasmas were relatively high (P<0.0001), demonstrating that Pro-C6 levels can be measured independent of blood preparation method.

[1088] E. Pro-C6 Competitive ELISA of Phase II Clinical Study Samples

[1089] The competitive ELISA was performed in the manner described above for C3M and Pro-C3. 96-well ELISA-plates used for the assay development were Streptavidin-coated; these were obtained from Roche (Cat.: 11940279). All ELISA plates were analyzed with the ELISA reader from Molecular Devices, SpectraMax M, (CA, USA). The monoclonal antibody 10A3 was labeled with horseradish peroxidase (HRP) using the Lightning link HRP labeling kit and following the instructions of the manufacturer (Innovabioscience, Babraham, Cambridge, UK). The 96-well streptavidin plate was coated with biotinylated synthetic peptide (Biotin-KPGVISVMGT (SEQ ID NO:238)) dissolved in coating buffer (40 mM Na₂HPO4, 7 mM KH₂PO4, 137 mM NaCl, 2.7 mM KCl, 0.1% Tween 20, 1% BSA, pH 7.4) and incubated 30 minutes at 20° C. 20 μL of standard peptide or plasma-EDTA samples diluted in incubation buffer (40 mM Na₂HPO₄, 7 mM KH₂PO₄, 137 mM NaCl, 2.7 mM KCl, 0.1% Tween 20, 1% BSA, 5% Liquid II, pH 7.4) were added to appropriate wells, followed by 100 μL of HRP conjugated monoclonal antibody 10A3, and incubated 21 hour at 4° C. Finally, 100 μL tetramethylbenzinidine (TMB) (Kem-En-Tec Cat. 4380H) was added and the plate was incubated 15 minutes at 20° C. in the dark. All the above incubation steps included shaking at 300 rpm. After each incubation step the plate was washed five times in washing buffer (20 mM Tris, 50 mM NaCl). The TMB reaction was stopped by adding 100 μL of stopping solution (1% H₂SO₄) and measured at 450 nm with 650 nm as the reference. A standard calibration curve was plotted using a 4-parametric mathematical fit model with a starting concentration of 10 ng/mL of the standard peptide following a 2-fold serial dilution and the last standard was a zero standard. Prior to use, all solutions were equilibrated to room temperature. The assay was performed at room temperature (18-22° C.). All reagents and samples were mixed before use avoiding formation of foam. All samples were measured in duplicates.

[1090] C8-C Assay

[1091] The C8-C competitive ELISA was originally developed and described by Hansen et al. (2016) Clin. Biochem. 49 (12):903-908. The methodology essentially was similar to the competitive ELISA assays for C3M and Pro-C3, as detailed above. Certain particular details regarding the neo-epitope and antibody are as follows:

[1092] A. Peptides

[1093] The C8-C neo-epitope has the sequence SFSGYLLYPM (SEQ ID NO:265). The immunogenic peptide, KLH-CGG-SFSGYLLYPM (SEQ ID NO:266), was used to generate monoclonal antibodies. The supernatants were screened for reactivity with Biotin-CGG-SFSGYLLYPM (SEQ ID NO:268), which was used as the screening peptide, and the free peptide (C8-C neo-epitope) SFSGYLLYPM (SEQ ID NO:265) served as calibrator. Native material and the elongated peptide SFSGYLLYPMA (SEQ ID NO:267) were used to test for specificity of the monoclonal antibodies. Synthetic peptides were purchased from the Chinese Peptide Company, Beijing, China.

[1094] B. Generation of Monoclonal Antibodies

[1095] The monoclonal antibodies were generated as described above for C3M and Pro-C3, using the immunogenic peptide for C8-C.

[1096] C. Screening of Monoclonal Antibodies

[1097] Screening of the antibodies was performed as described above for C3M and Pro-C3, using biotinylated C8-C neo-epitope as the screening peptide. Supernatants from the hybridoma clones generated in B. were screened for reactivity with Biotin-CGG-SFSGYLLYPM (SEQ ID NO:268). The monoclonal antibodies were tested for native reactivity and peptide affinity by displacement of human, mouse and rat serum, as well as with plasma and urine samples.

[1098] The supernatants from the growing monoclonal hybridoma cells were tested in a preliminary indirect ELISA on streptavidin coated microtiter plates, which were coated with 10 ng/ml biotinylated peptide (Biotin-CGG-SFSGYLLYPM (SEQ ID NO:268)). Clones that were specific for the standard peptide (SFSGYLLYPM (SEQ ID NO:265)) and not the elongated peptide (SFSGYLLYPMA (SEQ ID NO:267)) were then purified using protein G columns according to the manufacturer's protocol (GE Healthcare Life Science, Little Chalfont, Buckinghamshire, USA). Labeling of the antibodies with horse radish peroxidase (HRP) was performed using the Lightning link HRP labeling kit (Innovabioscience, Babraham, Cambridge, UK).

[1099] D. Assay Validation

[1100] Assay validation was performed in a manner similar to that described for C3M and Pro-C3 above. Linearity was determined by calculating recovery percentages in 2-fold dilutions of serum and plasma samples from human, rat and mouse. 21 blank samples (i.e., buffer) were used to determine the lower limit of detection (LLOD). 10 independent runs of 7 quality control (QC) samples, consisting of double determinations of the samples in duplicates, was used to determine the intra- and inter-assay variation of the C8-C assay. Mean coefficient of variance (CV %) within plates was used to calculate the intra-assay variation, while the mean CV % between the individual runs was used to calculate the inter-assay variation.

[1101] Accuracy of the assay was determined via the use of 2 healthy human serum samples (diluted 1:2) which were spiked with the standard peptide or human serum, and was calculated as the percentage recovery of the theoretical amount of serum. Interference was ascertained by spiking lipemia (intralipid), human antibodies against mouse antigens by human anti-mouse antibody (HAMA), biotin and hemoglobin in a 2-fold dilution to a serum sample. Concentrations of lipemia, biotin and hemoglobin started at 0.56 mmol/1, 160 μg/1 and 8.1 g/l, respectively.

[1102] A human serum sample with high concentrations of HAMA was spiked in 2-fold dilution to a normal human serum sample. The normal serum samples served as reference in order to calculate the percentage recovery. 3 rat and 3 human serum samples were subjected to 4 freeze (−20° C.) and thaw cycles, this was carried out to determine the stability of the analyte, with the first cycle serving as reference for calculation of the percentage recovery. Acceptable range for linearity, analyte stability and interference was ±20%.

[1103] E. C8-C Competitive ELISA of Phase II Clinical Study Samples

[1104] The competitive ELISA was performed in the manner described above for C3M and Pro-C3. Briefly, the C8-C competitive ELISA procedure was as follows:

[1105] 1. A 96-well streptavidin-coated microtiter plate (Cat. No. 11,940,279, Roche Diagnostics, Mannheim, Germany) was further coated with 100 μl biotinylated peptide (Biotin-KKKFSGYLLYPM (SEQ ID NO:269)) dissolved in assay buffer (50 mM Tris-BTB, pH 7.4) for 30 min at 20° C.

[1106] 2. The plate was washed 5 times in washing buffer (20 mM Tris, 50 mM NaCl, pH 7.2).

[1107] 3. 20 μl standard peptide, controls or samples were placed in duplicate in appropriate wells. 100 μl HRP-labeled antibody diluted in assay buffer was added and the resulting mixture incubates overnight (20 h) at 4° C.

[1108] 4. The plate was washed 5 times in washing buffer. 5. 100 μl tetramethylbenzinidine (TMB) (Cat. No. 4380H, Kem-En-Tec, Taastrup, Denmark) was added and incubated for 15 min at 20° C.

[1109] 6. 100 μl stopping solution (1% H₂SO₄) was added to stop the TMB reaction.

[1110] 7. The absorbance was read at 450 nm, with 650 nm as reference.

[1111] The incubations were performed in the dark on a shaker (300 rpm). The absorbance was read on an ELISA microplate reader (VersaMax, Molecular Devices, Sunnyvale, Calif., USA). A standard curve was generated by a 2-fold dilution of the standard peptide (SFSGYLLYPM (SEQ ID NO:240)).

### Example 13

### Preliminary Assessment of Circulating Extracellular Matrix (ECM) Peptide Markers for Identifying Subjects Most Likely to Benefit from PEGPH20 Treatment

[1112] Plasma-EDTA samples originating from subjects of the Phase II clinical study described in Example 9 were divided into two cohorts: Stage 1 (n=94) and Stage 2 (n=95). The samples were prepared as follows: For each subject, whole blood was collected in a BD Vacutainer™ EDTA tube (lavender top; Becton Dickinson, Franklin Lakes, N.J.). The cells and platelets were removed by centrifugation in a refrigerated centrifuge for 10 minutes at 1,000-2,000 g, followed by centrifugation for an additional 15 minutes at 2,000 g to remove the platelets. The resulting supernatant was designated as a plasma-EDTA sample.

[1113] A preliminary analysis was performed on the Stage 1 cohort samples to identify ECM markers that are predictive of benefit from PAG treatment compared to AG treatment. Benefit was assessed using increased progression free survival (PFS) as the survival outcome. The biomarkers C3M, Pro-C3, Pro-C6, VCANM and C8-C were each evaluated individually for their predictive value. In addition, the predictive value of the ratio of C3M/Pro-C3, which is representative of Type III collagen turnover, was evaluated. Levels of the biomarkers were measured using competitive ELISA as described in Example 12 above.

[1114] For each biomarker and biomarker ratio, subjects (plasma-EDTA samples of the subjects) were classified as “High” or “Low” based on a median (50th percentile) cutoff level of the biomarker or ratio. A univariate Cox regression analysis was performed for calculating the predictive value of each of the biomarkers and ratio for PFS. Of the biomarkers assessed, a statistically significant increase in benefit from PAG vs. AG treatment was observed for subjects having a “High” C3M/Pro-C3 ratio (P=0.031), compared to those having a “Low” C3M/Pro-C3 ratio. For subjects having a “High” ratio, the hazard ratio (HR), i.e., a measure of the probability of progressed disease with PAG treatment relative to the probability of progressed disease with AG treatment, was found to be 0.4. No significant difference between the PAG and AG treatment arms was observed for subjects having a “Low” C3M/Pro-C3 ratio (HR=1.09, P=0.807). The results from the various biomarkers are summarized in the Table below:

Effect of treatment (PAG vs. AG) on PFS in high
and low biomarker (median cut-point) subgroups

| Biomarker subgroup | HR | 95% CI | p |
|---|---|---|---|
| C3M low | 0.74 | 0.47-1.16 | 0.192 |
| C3M high | 0.70 | 0.33-1.45 | 0.332 |
| C8-C low | 0.72 | 0.38-1.38 | 0.323 |
| C8-C high | 0.56 | 0.21-1.45 | 0.231 |
| PRO-C3 low | 0.53 | 0.23-1.20 | 0.130 |
| PRO-C3 high | 0.88 | 0.43-1.80 | 0.735 |
| PRO-C6 low | 0.47 | 0.21-1.08 | 0.077 |
| PRO-C6 high | 1.07 | 0.53-2.17 | 0.853 |
| VCANM low | 0.63 | 0.32-1.23 | 0.176 |
| VCANM high | 0.73 | 0.30-1.74 | 0.725 |
| C3M/PRO-C3 low | 1.09 | 0.55-2.18 | 0.807 |
| C3M/PRO-C3 high | 0.40 | 0.17-0.92 | 0.031 |

[1115] The preliminary results demonstrate that the C3M/Pro-C3 ratio has predictive value for subjects most likely to benefit from PAG treatment compared to AG treatment. The results show that “High” ratio subjects (C3M/Pro-C3≥0.544) are likely to benefit from PAG treatment, as assessed by increased PFS when compared to treatment with AG.

### Example 14

### Predictive Effect of the C3M/Pro-C3 Ratio for Identifying Subjects Who Will Benefit from PEGPH20 Treatment

[1116] The Stage 1 and Stage 2 plasma-EDTA samples described in Example 13 above were further analyzed for the predictive value of C3M/Pro-C3 ratio. In a first set of analyses, The Stage 1 group was used as a discovery cohort for analyzing the predictive value of the ratio of levels of 2 markers related to ECM remodeling: C3M and Pro-C3, for selecting subjects who will benefit from PAG treatment. The Stage 2 cohort was used as a validation cohort based on the predictive ratio cutoff values identified in the Stage 1 group. In a second set of analyses, the Stage 2 group was used as a discovery cohort to independently identify predictive ratio cutoff values of C3M to Pro-C3 and the Stage 1 group was used a validation cohort.

[1117] Biomarker levels were measured blinded in the plasma-EDTA samples of each cohort, i.e., in the absence of information regarding the response status of the subjects to PAG treatment. PFS, OS and ORR were the survival outcomes that were measured to assess predictive value. The immunoassays described in Example 12 were used to measure C3M and Pro-C3 levels.

[1118] Cutoff Values used to designate responders (“Ratio High” group) vs. non-responders (“Ratio Low” group) are as follows:

[1119] 1. Percentile ranking: a cutoff was selected so that when the patient's biomarker level or ratio of two biomarker levels, e.g., C3M/Pro-C3, is equal or greater than the cutoff, the statistical ranking of a patient regarding his/her biomarker level can fall into a specific percentile range, for example, top quartile (75th percentile), or top 50% (median 50th percentile). Univariate Cox regression analysis was performed to verify a statistically significant correlation between individuals classified as “high” or “low” for the various thresholds and the increased benefit seen when administered treatment with an anti-hyaluronan agent compared to treatment without an anti-hyaluronan agent.

[1120] 2. ROC (receiver/relative operating characteristic curve) analysis: A ROC cutoff was determined by obtaining a receiver/relative operating characteristic curve (ROC curve). The ROC curve is generated by plotting the true positive rate (TPR, or sensitivity) against the false positive rate (FPR) using various cutoffs. A patient whose biomarker level (or ratio of two biomarker levels) is equal to or above a cutoff is classified as a responder (‘Ratio High”) whereas the one whose biomarker level below the cutoff is classified as a non-responder (“Ratio Low”). The TPR or Sensitivity represents the probability that a subject identified as responder is in actuality a responder (a complete or partial responder to treatment with PAG, as defined by RECIST). Specificity represents the probability that a subject identified as a non-responder is in actuality a non-responder (stable or progressed disease as defined by RECIST). The FPR is defined as 1−Specificity. The optimal cutoff (ROC cutoff) was determined by the cutoff yielding the maximum value of J (Youden's index)=Sensitivity+Specificity−1, and represents the ratio of C3M/Pro-C3 that is optimal in its differentiating ability when equal weight is given to Sensitivity and Specificity. A statistical analysis, such as a univariate Cox regression analysis, was performed to verify a statistically significant correlation between individuals classified as “high” or “low” for the various thresholds and the increased benefit seen when administered treatment with an anti-hyaluronan agent compared to treatment without an anti-hyaluronan agent.

### Stage 1 as Discovery Cohort

[1121] The immunoassays described in Example 12 were used to measure C3M and Pro-C3 levels. The C3M/Pro-C3 ratio was calculated by dividing the C3M level (ng/ml) by the Pro-C3 level (ng/ml) measured in the same sample (i.e., from the same subject).

[1122] The Stage 1 group subjects were assigned a “Ratio High” or “Ratio Low” group by three cutoff criteria, (A), (B) and (C) determined by the percentile or ROC analyses described above:
[1123] (A) 50th Percentile Cutoff: The “Ratio High” group included subjects whose ratios were in the top 50th percentile (median (50th percentile)) of the C3M/Pro-C3 ratios of all the subjects (C3M/Pro-C3≥0.544) and the “Ratio Low” group included subjects whose ratios were in the bottom 50th percentile. (C3M/Pro-C3<0.544).
[1124] (B) 75th Percentile Cutoff: The “Ratio High” group included subjects whose ratios were in the top quartile of the C3M/Pro-C3 ratios of all the subjects (C3M/Pro-C3≥0.872) and the “Ratio Low” group included subjects whose ratios were in the bottom three quartiles. (C3M/Pro-C3<0.872).
[1125] (C) ROC analysis based Cutoff: The ROC analysis of response data of Stage 1 subjects, performed as described above, yielded a C3M/Pro-C3 ratio of 0.702 as the optimal cutoff. The “Ratio High” group included subjects whose ratios were equal to or greater than ROC cutoff (C3M/Pro-C3≥0.702) and the “Ratio Low” group included subjects whose ratios were less than the ROC cutoff (C3M/Pro-C3<0.702).

[1126] The statistical methods employed are as discussed in Example 9 above, except Univariate Cox analysis without stratification was performed to assess progression free survival (PFS) or overall survival (OS) of subjects treated with PAG or AG and classified as being “Ratio High” or “Ratio Low” according to the (A), (B) and (C) groupings. Overall response rate (ORR) was assessed by applying Fisher's exact test to compare CR+PR (complete response+partial response) and SD+PD (stable disease+progressive disease) subjects in each treatment arm (PAG or AG) in the “Ratio High” vs. the “Ratio Low” groups as defined by the cutoff points for (A), (B) or (C).

[1127] Progression Free Survival (PFS)

[1128] For all three cutoff points ((A), (B) and (C)), when PFS was assessed as the survival outcome, the C3M/Pro-C3 ratio was found to be predictive for the selection of subjects that will benefit from PAG treatment. The results show that for all three cutoff points, a high C3M/Pro-C3 ratio favors treatment with PAG. Thus, the C3M/Pro-C3 ratio is predictive for the selection of subjects that will benefit from PAG treatment.

[1129] The predictive value of the high C3M/Pro-C3 ratio was best when the 75th percentile was used a cutoff point; while there was no statistically significant difference in PFS for “Ratio Low” subjects (C3M/Pro-C3<0.872) treated with PAG or AG (median PFS of 3.0 months with PAG treatment, median PFS of 5.7 months with AG treatment, P=0.927 and HR (95% CI)=0.97 (0.54-1.76)), “Ratio High” subjects (C3M/Pro-C3≥0.872) treated with PAG had a significantly higher median PFS of 9.8 months, compared to a median PFS of 3.8 months for subjects treated with AG (P=0.004, HR (95% CI)=0.11 (0.03-0.49)). Thus, subjects classified as “Ratio High” have a C3M/Pro-C3 ratio that favors treatment with PAG, as assessed by PFS as the survival outcome.

[1130] The predictive value of the C3M/Pro-C3 ratio also was seen with the ROC cutoff and the 50th percentile cutoff. For the ROC cutoff, while there was no statistically significant difference in PFS for “Ratio Low” subjects (C3M/Pro-C3<0.702) treated with PAG or AG (median PFS of 2.5 months with PAG treatment, median PFS of 5.7 months with AG treatment, P=0.677 and HR (95% CI)=1.15 (0.60-2.21)), “Ratio High” subjects (C3M/Pro-C3≥0.702) treated with PAG had a significantly higher median PFS of 9.5 months, compared to a median PFS of 4.3 months for subjects treated with AG (P=0.003, HR (95% CI)=0.23 (0.09-0.61)). For the 50th percentile cutoff, while there was no statistically significant difference in PFS for “Ratio Low” subjects (C3M/Pro-C3<0.544) treated with PAG or AG (median PFS of 3.0 months with PAG treatment, median PFS of 5.2 months with AG treatment, P=0.807 and HR (95% CI)=1.09 (0.55-2.18)), “Ratio High” subjects (C3M/Pro-C3≥0.544) treated with PAG had a significantly higher median PFS of 8.0 months, compared to a median PFS of 5.3 months for subjects treated with AG (P=0.031, HR (95% CI)=0.40 (0.17-0.92)).

[1131] Thus, subjects classified as “Ratio High” have a C3M/Pro-C3 ratio that favors treatment with PAG, as assessed by PFS as the survival outcome, regardless of whether (A), (B) or (C) was used as the cutoff ratio.

[1132] Objective (Overall) Response Rate (ORR)

[1133] The ORR for “Ratio High” subjects was found to be significantly higher for subjects treated with PAG, when compared to treatment with AG. These results, in which ORR was measured as the survival outcome, are similar to those obtained by measuring PFS. The predictive value was found to be highest when the 75th percentile was used as the cutoff point; “Ratio High” subjects had an ORR of 73% when treated with PAG, compared to an ORR of only 14% when treated with AG. When the 50th percentile was used as the cutoff point; “Ratio High” subjects had an ORR of 67% when treated with PAG, compared to an ORR of 29% when treated with AG. When the ROC cutoff was used as the cutoff point; “Ratio High” subjects had an ORR of 70% when treated with PAG, compared to an ORR of 21% when treated with AG. No significant difference in ORR was observed between the PAG and AG treatment arms for “Ratio Low” subjects. Thus, subjects classified as “Ratio High” have a C3M/Pro-C3 ratio that favors treatment with PAG, as assessed by ORR as the survival outcome. These results further affirm the predictive value of the C3M/Pro-C3 ratio for the selection of subjects who will benefit from PEHPH20 being included in the treatment regimen.

### Stage 2 as Validation Cohort

[1134] The Stage 2 validation cohort was analyzed in a manner similar to that described above under Stage 1 analysis, using the (A), (B) and (C) ratio cutoff values identified in the Stage 1 analysis. For the Stage 2 analysis, OS and PFS were analyzed as survival outcomes.

[1135] Progression Free Survival (PFS)

[1136] Like the Stage 1 analysis, an overall trend in improved PFS was observed for “High” C3M/Pro-C3 subjects when treated with PAG compared to treatment with AG. At the 50th percentile cutoff value, a statistically significant difference in PFS was observed for “High” ratio subjects treated with PAG. “Ratio High” subjects (C3M/Pro-C3≥0.544) treated with PAG had a significantly higher median PFS of 8.8 months, compared to a median PFS of 3.4 months for subjects treated with AG (P=0.046, HR (95% CI)=0.46 (0.21-0.98)). In contrast, there was no statistically significant difference in PFS for “Ratio Low” subjects (C3M/Pro-C3<0.544) treated with PAG or AG (median PFS of 5.3 months with PAG treatment, median PFS of 5.8 months with AG treatment, P=0.557 and HR (95% CI)=1.30 (0.54-3.16)).

[1137] When the 75th percentile was used a cutoff point, there was no statistically significant difference in PFS for “Ratio Low” subjects (C3M/Pro-C3<0.872) treated with PAG or AG (median PFS of 6.0 months with PAG treatment, median PFS of 5.3 months with AG treatment, P=0.647 and HR (95% CI)=0.87 (0.48-1.58)). In contrast, “Ratio High” subjects (C3M/Pro-C3≥0.872) treated with PAG had a higher median PFS of 11.1 months, compared to a median PFS of 1.8 months for subjects treated with AG (P=0.230, HR (95% CI)=0.40 (0.09-1.80)). For the ROC cutoff, while there was no statistically significant difference in PFS for “Ratio Low” subjects (C3M/Pro-C3<0.702) treated with PAG or AG (median PFS of 5.8 months with PAG treatment or AG treatment, P=0.967 and HR (95% CI)=1.01 (0.51-2.03)), “Ratio High” subjects (C3M/Pro-C3≥0.702) treated with PAG had a significantly higher median PFS of 8.8 months, compared to a median PFS of 3.4 months for subjects treated with AG (P=0.099, HR (95% CI)=0.45 (0.18-1.16)). Thus, subjects classified as “Ratio High” were confirmed as having a C3M/Pro-C3 ratio that favors treatment with PAG, as assessed by PFS as the survival outcome.

[1138] Thus, subjects classified as “Ratio High” have a C3M/Pro-C3 ratio that favors treatment with PAG, as assessed by PFS as the survival outcome, regardless of whether (A), (B) or (C) was used as the cutoff ratio.

[1139] Overall Survival (OS)

[1140] An overall trend in improved overall survival (OS) was observed for “High” C3M/Pro-C3 ratio subjects treated with PAG compared to AG. Statistically significant increases in OS were observed for the ROC and 50th percentile cutoff points. For the ROC cutoff, while there was no statistically significant difference in PFS for “Ratio Low” subjects (C3M/Pro-C3<0.702) treated with PAG or AG (median OS of 9.4 months with PAG treatment; median OS of 9.2 months with AG treatment, P=0.313 and HR (95% CI)=0.74 (0.41-1.33)), “Ratio High” subjects (C3M/Pro-C3≥0.702) treated with PAG had a significantly higher median OS of 17.4 months, compared to a median OS of 8.5 months for subjects treated with AG (P=0.020, HR (95% CI)=0.31 (0.11-0.83)). For the 50th percentile cutoff, while there was no statistically significant difference in OS for “Ratio Low” subjects (C3M/Pro-C3<0.544) treated with PAG or AG (median PFS of 7.9 months with PAG treatment, median PFS of 9.0 months with AG treatment, P=0.525 and HR (95% CI)=0.80 (0.41-1.57)), “Ratio High” subjects (C3M/Pro-C3≥0.544) treated with PAG had a significantly higher median OS of 13.8 months, compared to a median OS of 8.5 months for subjects treated with AG (P=0.009, HR (95% CI)=0.35 (0.16-0.77)).

[1141] In addition, when the 75th percentile was used a cutoff point, while there was no statistically significant difference in PFS for “Ratio Low” subjects (C3M/Pro-C3<0.872) treated with PAG or AG (median OS of 9.6 months with PAG treatment, median OS of 9.0 months with AG treatment, P=0.060 and HR (95% CI)=0.59 (0.34-1.02)), “Ratio High” subjects (C3M/Pro-C3≥0.872) treated with PAG had a higher median OS of 17.9 months, compared to a median OS of 7.8 months for subjects treated with AG (P=0.297, HR (95% CI)=0.46 (0.11-1.98)). Thus, subjects classified as “Ratio High” were confirmed as having a C3M/Pro-C3 ratio that favors treatment with PAG, when assessed using OS as the survival outcome.

### Total (Stage 1 Discovery+Stage 2 Validation) Cohort

[1142] The total cohort (Stage 1+Stage 2 samples combined) was analyzed in a manner similar to that described above under Stage 1 analysis, using the (A), (B) and (C) ratio cutoff values identified in the Stage 1 analysis. For the total cohort analysis, PFS and ORR were analyzed as survival outcomes.

[1143] Progression Free Survival (PFS)

[1144] For all three cutoff points ((A), (B) and (C)), when PFS was assessed as the survival outcome, the C3M/Pro-C3 ratio was found to be predictive for the selection of subjects that will benefit from PAG treatment. The results show that for all three cutoff points, a high C3M/Pro-C3 ratio favors treatment with PAG. Thus, the C3M/Pro-C3 ratio is predictive for the selection of subjects that will benefit from PAG treatment.

[1145] The predictive value of the high C3M/Pro-C3 ratio was best when the 75th percentile was used a cutoff point; while there was no statistically significant difference in PFS for “Ratio Low” subjects (C3M/Pro-C3<0.872) treated with PAG or AG (median PFS of 5.3 months with PAG treatment, median PFS of 5.4 months with AG treatment, P=0.541 and HR (95% CI)=0.88 (0.59-1.32)), “Ratio High” subjects (C3M/Pro-C3≥0.872) treated with PAG had a significantly higher median PFS of 9.8 months, compared to a median PFS of 3.8 months for subjects treated with AG (P=0.011, HR (95% CI)=0.31 (0.13-0.76)). Thus, subjects classified as “Ratio High” have a C3M/Pro-C3 ratio that favors treatment with PAG, as assessed by PFS as the survival outcome.

[1146] The predictive value of the C3M/Pro-C3 ratio also was seen with the ROC cutoff and the 50^{th} percentile cutoff. For the ROC cutoff, while there was no statistically significant difference in PFS for “Ratio Low” subjects (C3M/Pro-C3<0.702) treated with PAG or AG (median PFS of 4.7 months with PAG treatment, median PFS of 5.7 months with AG treatment, P=0.918 and HR (95% CI)=1.02 (0.64-1.63)), “Ratio High” subjects (C3M/Pro-C3≥0.702) treated with PAG had a significantly higher median PFS of 8.8 months, compared to a median PFS of 4.3 months for subjects treated with AG (P=0.001, HR (95% CI)=0.34 (0.18-0.64)). For the 50^{th} percentile cutoff, while there was no statistically significant difference in PFS for “Ratio Low” subjects (C3M/Pro-C3<0.544) treated with PAG or AG (median PFS of 3.7 months with PAG treatment, median PFS of 5.7 months with AG treatment, P=0.797 and HR (95% CI)=1.79 (0.64-1.79)), “Ratio High” subjects (C3M/Pro-C3≥0.544) treated with PAG had a significantly higher median PFS of 8.8 months, compared to a median PFS of 4.5 months for subjects treated with AG (P=0.004, HR (95% CI)=0.45 (0.26-0.78)).

[1147] Thus, subjects classified as “Ratio High” have a C3M/Pro-C3 ratio that favors treatment with PAG, as assessed by PFS as the survival outcome, regardless of whether (A), (B) or (C) was used as the cutoff ratio.

[1148] Objective (Overall) Response Rate (ORR)

[1149] An overall trend in increased ORR for “Ratio High” subjects treated with PAG, when compared to treatment with AG. When the 75th percentile was used as the cutoff point; “Ratio High” subjects had an ORR of 68% when treated with PAG, compared to an ORR of only 30% when treated with AG (P=0.062). When the 50th percentile was used as the cutoff point; “Ratio High” subjects had a significantly higher ORR (P=0.036) of 74% when treated with PAG, compared to an ORR of 26% when treated with AG. When the ROC cutoff was used as the cutoff point; “Ratio High” subjects had a significantly higher ORR (P=0.008) of 66% when treated with PAG, compared to an ORR of 29% when treated with AG. No significant difference in ORR was observed between the PAG and AG treatment arms for “Ratio Low” subjects. Thus, subjects classified as “Ratio High” have a C3M/Pro-C3 ratio that favors treatment with PAG, as assessed by ORR as the survival outcome. These results further affirm the predictive value of the C3M/Pro-C3 ratio for the selection of subjects most likely to benefit from PEHPH20 being included in the treatment regimen.

### Stage 2 as Discovery Cohort

[1150] In a second set of analyses, the Stage 2 group of subjects were used as the discovery group to identify predictive cutoff points. Subjects were assigned a “Ratio High” or “Ratio Low” group based on percentile ranking metholodogy, (1) and (2), as follows:
[1151] (1) 50th Percentile Cutoff: The “Ratio High” group included subjects whose ratios were in the top 50th percentile (also referred to as median (50th percentile)) of the C3M/Pro-C3 ratios of all the Stage 2 subjects (C3M/Pro-C3≥0.5) and the “Ratio Low” group included subjects whose ratios were in the bottom 50th percentile (C3M/Pro-C3<0.5).
[1152] (2) 75th Percentile Cutoff: The “Ratio High” group included subjects whose ratios were in the top quartile (75th percentile) of the C3M/Pro-C3 ratios of all the Stage 2 subjects (C3M/Pro-C3≥0.768) and the “Ratio Low” group included subjects whose ratios were in the bottom three quartiles of the C3M/Pro-C3 ratios of all the Stage 2 subjects (C3M/Pro-C3<0.768).

[1153] Progression Free Survival (PFS)

[1154] An overall trend of increased PFS was seen for “High” C3M/Pro-C3 subjects treated with PAG, when compared to AG treatment. Significantly higher PFS was observed for “High” C3M/Pro-C3 subjects using the median (50th percentile) cutoff point (P=0.036). While there was no statistically significant difference in PFS for “Ratio Low” subjects (C3M/Pro-C3<0.5) treated with PAG or AG (median PFS of 5.0 months with PAG treatment, median PFS of 5.8 months with AG treatment, P=0.531 and HR (95% CI)=1.36 (0.52-3.54)), “Ratio High” subjects (C3M/Pro-C3≥0.5) treated with PAG had a significantly higher median PFS of 8.8 months, compared to a median PFS of 4.5 months for subjects treated with AG (P=0.036, HR (95% CI)=0.45 (0.21-0.95)). When the 75th percentile was used as cutoff, while there was no statistically significant difference in PFS for “Ratio Low” subjects (C3M/Pro-C3<0.768) treated with PAG or AG (median PFS of 5.8 months with PAG treatment, median PFS of 5.3 months with AG treatment, P=0.647 and HR (95% CI)=0.98 (0.51-1.89)), “Ratio High” subjects (C3M/Pro-C3≥0.768) treated with PAG had a higher median PFS of 11.1 months, compared to a median PFS of 3.4 months for subjects treated with AG (P=0.102, HR (95% CI)=0.41 (0.14-1.19)). Thus, subjects classified as “Ratio High” have a C3M/Pro-C3 ratio that favors treatment with PAG, as assessed using PFS as the survival outcome.

[1155] Overall Survival (OS)

[1156] An overall trend in improved overall survival (OS) was observed for “High” C3M/Pro-C3 ratio subjects treated with PAG when compared to AG. Statistically significant increases in OS were observed for both the median (50th percentile) cutoff and the 75th percentile cutoff points. For the median (50th percentile) cutoff, while there was no statistically significant difference in OS for “Ratio Low” subjects (C3M/Pro-C3<0.5) treated with PAG or AG (median OS of 7.8 months with PAG treatment; median OS of 9.2 months with AG treatment, P=0.668 and HR (95% CI)=0.86 (0.43-1.71)), “Ratio High” subjects (C3M/Pro-C3≥0.5) treated with PAG had a significantly higher median OS of 17.4 months, compared to a median OS of 8.5 months for subjects treated with AG (P=0.004, HR (95% CI)=0.32 (0.15-0.70)). For the 75th percentile cutoff, while there was no statistically significant difference in OS for “Ratio Low” subjects (C3M/Pro-C3<0.768) treated with PAG or AG (median PFS of 9.4 months with PAG treatment, median PFS of 9.0 months with AG treatment, P=0.188 and HR (95% CI)=0.68 (0.38-1.21)), “Ratio High” subjects (C3M/Pro-C3≥0.768) treated with PAG had a significantly higher median OS of 17.9 months, compared to a median OS of 8.5 months for subjects treated with AG (P=0.027, HR (95% CI)=0.28 (0.09-0.87)). Thus, subjects classified as “Ratio High” were confirmed as having a C3M/Pro-C3 ratio that favors treatment with PAG, when assessed using OS as the survival outcome.

### Stage 1 as Validation Cohort

[1157] The Stage 1 validation cohort was analyzed in a manner similar to that described above under Stage 2 discovery analysis, using the (1) and (2) ratio cutoff values identified in the Stage 2 discovery analysis. For the Stage 1 validation analysis, ORR and PFS were analyzed as survival outcomes.

[1158] Progression Free Survival (PFS)

[1159] Statistically significant increases in PFS were observed for both cutoff points. When the median (50th percentile) was applied as the cutoff value, “Ratio High” subjects (C3M/Pro-C3≥0.5) treated with PAG had a significantly higher median PFS of 6.7 months, compared to a median PFS of 5.3 months for subjects treated with AG (P=0.027, HR (95% CI)=0.40 (0.18-0.90)). In contrast, there was no statistically significant difference in PFS for “Ratio Low” subjects (C3M/Pro-C3<0.5) treated with PAG or AG (median PFS of 2.5 months with PAG treatment, median PFS of 5.1 months with AG treatment, P=0.769 and HR (95% CI)=1.11 (0.54-2.28)).

[1160] When the 75th percentile was used a cutoff point, there was no statistically significant difference in PFS for “Ratio Low” subjects (C3M/Pro-C3<0.768) treated with PAG or AG (median PFS of 2.5 months with PAG treatment, median PFS of 5.9 months with AG treatment, P=0.769 and HR (95% CI)=1.09 (0.60-2.00)). In contrast, “Ratio High” subjects (C3M/Pro-C3≥0.768) treated with PAG had a significantly higher median PFS of 9.8 months, compared to a median PFS of 3.8 months for subjects treated with AG (P=0.001, HR (95% CI)=0.09 (0.02-0.36)). Thus, subjects classified as “Ratio High” have a C3M/Pro-C3 ratio that favors treatment with PAG, as assessed by PFS as the survival outcome, regardless of whether (1) or (2) was used as the cutoff ratio.

[1161] Objective (Overall) Response Rate (ORR)

[1162] An overall trend in increased ORR was seen for “Ratio High” subjects treated with PAG, when compared to treatment with AG. When the median (50th percentile) ratio (0.5) was used as the cutoff point; “Ratio High” subjects (C3M/Pro-C3≥0.768) had an ORR of 64% when treated with PAG, compared to an ORR of 33% when treated with AG (P=0.067). When the 75th percentile was used as the cutoff point, “Ratio High” subjects had a significantly higher ORR (P=0.011) of 71% when treated with PAG, compared to an ORR of 11% when treated with AG. No significant difference in ORR was observed between the PAG and AG treatment arms for “Ratio Low” subjects. Thus, subjects classified as “Ratio High” have a C3M/Pro-C3 ratio that favors treatment with PAG, as assessed by ORR as the survival outcome. These results further affirm the predictive value of the C3M/Pro-C3 ratio for the selection of subjects will benefit from PEGPH20 being included in the treatment regimen.

### Total (Stage 2 Discovery+Stage 1 Validation) Cohort

[1163] The total cohort (Stage 1+Stage 2 samples combined) was analyzed in a manner similar to that described above under Stage 2 discovery analysis, using the (1) and (2) ratio cutoff values identified in the Stage 2 discovery analysis. For the total cohort analysis, PFS and ORR were analyzed as survival outcomes.

[1164] Progression Free Survival (PFS)

[1165] For both cutoff points ((1) and (2)), when PFS was assessed as the survival outcome, the C3M/Pro-C3 ratio was found to be predictive for the selection of subjects most likely to benefit from PAG treatment. The results show that for both cutoff points, a high C3M/Pro-C3 ratio favors treatment with PAG. Thus, the C3M/Pro-C3 ratio is predictive for the selection of subjects that will benefit from PAG treatment.

[1166] When the median (50th percentile) was used as cutoff, while there was no statistically significant difference in PFS for “Ratio Low” subjects (C3M/Pro-C3<0.5) treated with PAG or AG (median PFS of 3.7 months with PAG treatment, median PFS of 5.7 months with AG treatment, P=0.691 and HR (95% CI)=1.11 (0.65-1.90)), “Ratio High” subjects (C3M/Pro-C3≥0.5) treated with PAG had a significantly higher median PFS of 8.8 months, compared to a median PFS of 5.2 months for subjects treated with AG (P=0.003, HR (95% CI)=0.45 (0.26-0.75)). When the 75th percentile was applied as cutoff, while there was no statistically significant difference in PFS for “Ratio Low” subjects (C3M/Pro-C3<0.768) treated with PAG or AG (median PFS of 5.3 months with PAG treatment, median PFS of 5.9 months with AG treatment, P=0.960 and HR (95% CI)=0.99 (0.64-1.52)), “Ratio High” subjects (C3M/Pro-C3≥0.768) treated with PAG had a significantly higher median PFS of 9.8 months, compared to a median PFS of 3.8 months for subjects treated with AG (P=0.001, HR (95% CI)=0.28 (0.14-0.59)). Thus, subjects classified as “Ratio High” have a C3M/Pro-C3 ratio that favors treatment with PAG, as assessed by PFS as the survival outcome, regardless of the cutoff ratio.

[1167] Objective (Overall) Response Rate (ORR)

[1168] An overall trend in increased ORR for “Ratio High” subjects treated with PAG, when compared to treatment with AG, was observed. When the 75th percentile was used as the cutoff point, “Ratio High” subjects had a significantly higher ORR of 71% when treated with PAG, compared to an ORR of only 27% when treated with AG (P=0.001). When the median (50th percentile) was used as the cutoff point, “Ratio High” subjects had a higher ORR of 63% when treated with PAG, compared to an ORR of 41% when treated with AG (P=0.070). Thus, subjects classified as “Ratio High” have a C3M/Pro-C3 ratio that favors treatment with PAG, as assessed by ORR as the survival outcome.

### Example 15

### Testing of C3M/Pro-C3 Ratio Cutoff Values for their Ability to Predict Subjects Who Will Benefit from PEGPH20 Treatment—Likelihood Ratio Test

[1169] Three cutoff scenarios with lower cutoff values from those exemplified in Example 14, based on different survival outcomes, were tested for their prediction of increased benefit to a larger group of subjects when a treatment regimen includes administration of PEGPH20:

[1170] 1) OS cutoff at the largest predicted fraction of subjects with potential to be treated meeting the desired clinical benefits;

[1171] 2) PFS cutoff at the largest predicted fraction of subjects with potential to be treated meeting desired clinical benefits; and

[1172] 3) OS cutoff from Scenario 1) applied to PFS to calculate the fraction of subjects with potential to be treated. OS is considered one of the reliable cancer endpoints in measuring survival outcomes (Guidance for Industry Clinical Trial Endpoints for the Approval of Cancer Drugs and Biologics, 2007, FDA CDER and CBER). In a situation where only one cutoff driven by OS is desired, the performance of PFS when tied to the OS cutoff can be evaluated and can clarify the clinically meaningful message to subjects and healthcare providers.

[1173] Example 9 describes the subject population used for testing the above three cutoff scenarios. All calculations were run in R programming language, as described and listed in the Software Versions Table herein.

[1174] Scenario 1:

[1175] OS cutoff at largest predicted subject prevalence meeting the desired clinical benefits. The criteria employed were whether two forms of clinical benefit were met or exceeded, and whether their confidence intervals lie within a specified range to be considered significant. The data used were from the Stage 2 intent to treat (ITT) subjects described in Example 9.

[1176] The biomarker ratio (C3M/Pro-C3) cutoff was defined as one where the OS log-rank p-value is significant (<0.05), and for the largest fraction of subjects with potential to treat, where at least one of the following conditions are satisfied:

[1177] 1) OS median survival ≥4.2 months (base case), and OS median survival 95% CI>0, and OS hazard ratio (HR)<0.79 (low case), and OS hazard ratio (HR) 95% CI>0.

[1178] 2) OS median survival ≥2.3 months (low case), and OS median survival 95% CI>0, and OS hazard ratio (HR)<0.67 (base case), and OS hazard ratio (HR) 95% CI>0.

[1179] FIGS. 12A-12D show the statistical significance of overall survival (OS) and clinical benefit as a function of the cutoff ratio of C3M/Pro-C3. In FIG. 12A, it is shown that Condition 2 was satisfied at a biomarker cutoff ratio of C3M/Pro-C3=0.38. FIG. 12A shows that the fraction of subjects with the potential to be treated=0.63 at the OS cutoff ratio (median survival of 2.3 months) of 0.38 (the point on the curve that intersects with the vertical line). The Likelihood Ratio test p-value was 0.05 (see horizontal line, FIG. 12B). The estimated Hazard Ratio (top horizontal line in FIG. 12C) indicates a maximum upper 95% confidence interval=1, the middle horizontal line indicates low case for clinical benefit=0.79, and the lowest horizontal line indicates base case for clinical benefit=0.67. FIG. 12D shows the Likelihood Ratio test Median Difference between the two trial arms (PAG and AG); the top horizontal line indicates a base case for clinical benefit=4.2 months, the middle horizontal line indicates a low case for clinical benefit=2.3 months and the lowest horizontal line indicates a lower 95% confidence interval=0 months.

[1180] The results show that using a cutoff of ≥0.38 (p-value=0.021), 63% of the subject population (Point in FIG. 12A that intersects with vertical line from cutoff) could see 2.3 months median survival difference (95% CI: 0-NA) and an HR of 0.46 (95% CI: 0.24-0.88) using PEGPH20 treatment, when compared to the control group that was not administered PEGPH20. Additional potential benefit could be possible if the cutoff is increased, but it would come at the cost of reducing the fraction of subjects with potential to be treated.

[1181] Scenario 2:

[1182] PFS cutoff at largest predicted fraction of subjects with potential to treat meeting the desired clinical benefits. The criteria employed were whether two forms of clinical benefit were met or exceeded, and whether their confidence intervals lie within a specified range to be considered significant. The data used were from the Stage 1 and Stage 2 intent to treat (ITT) subjects described in Example 9.

[1183] The biomarker ratio (C3M/Pro-C3) cutoff was defined as one where the PFS log-rank p-value is significant (<0.05), and for the largest fraction of potential responders, where at least one of the following conditions are satisfied:

[1184] 1) PFS median survival ≥3.9 months (base case), and PFS median survival 95% CI>0, and PFS hazard ratio (HR)≤0.70 (low case), and PFS hazard ratio (HR) 95% CI>0.

[1185] 2) PFS median survival ≥2.4 months (low case), and PFS median survival 95% CI>0, and PFS hazard ratio (HR)≤0.59 (base case), and PFS hazard ratio (HR) 95% CI>0.

[1186] FIGS. 13A-13D show the statistical significance of overall progression free survival (PFS) and clinical benefit as a function of the cutoff ratio of C3M/Pro-C3. In FIGS. 13A-13D, it is shown that Condition 2 was satisfied at a biomarker cutoff ratio=0.45 (p-value=0.0046). FIG. 13A shows that the fraction of subjects with the potential to be treated=0.55 at the PFS cutoff ratio (median survival of 2.6 months) of 0.45 (the point on the curve that intersects with the vertical line). The Likelihood Ratio test p-value was found to be 0.05 (see horizontal line, FIG. 13B). The estimated Hazard Ratio (top horizontal line in FIG. 13C) indicates a maximum upper 95% confidence interval=1, the middle horizontal line indicates low case for clinical benefit=0.70, and the lowest horizontal line indicates base case for clinical benefit=0.59. FIG. 13D shows the Likelihood Ratio test Difference between the two trial arms (PAG and AG); the top horizontal line indicates a base case for clinical benefit=3.9 months, the middle horizontal line indicates a low case for clinical benefit=2.4 months and the lowest horizontal line indicates a lower 95% confidence interval=0 months.

[1187] The results show that using a cutoff ratio of ≥0.45, 55% of the subject population (Point in FIG. 13A that intersects with vertical line from cutoff) could see 2.6 months median survival difference (95% CI: 0.0-5.5) and an HR of 0.48 (95% CI: 0.29-0.79) using PEGPH20 treatment, when compared to the control group that was not administered PEGPH20. Additional potential benefit could be possible if the cutoff is increased, but it would come at the cost of reducing the fraction of subjects with potential to be treated.

[1188] Scenario 3:

[1189] Predicted clinical benefits in PFS at the OS cutoff from Scenario 1. The data used were from the Stage 1 and Stage 2 subjects described in Example 9.

[1190] The statistical significance and potential (predicted) clinical benefit of overall progression free survival (PFS) was determined at the optimal OS cutoff calculated in Scenario 1 (Cutoff Ratio=0.38). PFS log-rank p-value was found to be significant (p-value=0.020). It is observed in FIG. 14A that 63% of the subject population (Point on FIG. 14A that intersects with vertical line from cutoff) could see 1.4 months median survival difference (95% CI: 0-4.4) and an HR of 0.56 (95% CI: 0.35-0.91) using PEGPH20 treatment, when compared to the control arm not administered PEGPH20. Likelihood Ratio test p-value was found to be 0.05 (see horizontal line, FIG. 14B). The estimated Hazard Ratio (top horizontal line in FIG. 14C) indicates a maximum upper 95% confidence interval=1, the middle horizontal line indicates low case for clinical benefit=0.70, and the lowest horizontal line indicates base case for clinical benefit=0.59. FIG. 14D shows the Kaplan-Meier Median Difference between the two trial arms (PAG and AG); the top horizontal line indicates a base case for clinical benefit=3.9 months, the middle horizontal line indicates a low case for clinical benefit=2.4 months and the lowest horizontal line indicates a lower 95% confidence interval=0 months.

[1191] Additional potential benefit could be possible if the cutoff is increased, but it would come at the cost of reducing the fraction of subjects with potential to be treated. The results are summarized in Table 10 below:

TABLE 10
Summary of Results

| | | | | | | | Median Survival |
|---|---|---|---|---|---|---|---|
| | | | | | HR Potential | Likelihood | Potential |
| | | | | | Clinically | Ratio test | Clinically |
| | | Potential | p- | | meaningful | Median | meaningful |
| Scenario | Cutoff | to Treat | value | HR | benefit | Survival | benefit |
| 1) OS | 0.38 | 63% | 0.021 | 0.46 (95% | Base case | 2.3 mo (95% | Low case |
| | | | | CI: 0.24-0.88) | | CI: 0-NA) | |
| 2) PFS | 0.45 | 55% | 0.0046 | 0.48 (95% | Base case | 2.6 mo (95% | Low case |
| | | | | CI: 0.29-0.79) | | CI: 0-5.5) | |
| 3) PFS at | 0.38 | 63% | 0.020 | 0.56 (95% | Base case | 1.4 mo (95% | Minimal benefit |
| OS cutoff | | | | CI: 0.35-0.91) | | CI: 0-4.4) | not met |

[1192] The results demonstrate that predicted (potential) clinical benefit of PEGPH20 treatment can extend over a range of cutoff values. Selection of a particular cutoff identifies more or fewer subjects for treatment, and also eliminates or includes subjects for treatment. For example, PEGPH20 was shown to have predicted clinical benefit for PFS and OS at the Median (50th percentile), such that 50% of patients predicted to benefit from treatment.

### Example 16

### Testing of C3M/Pro-C3 Ratio Cutoff Values for their Ability to Predict Subjects Who Will Benefit from PEGPH20 Treatment—Kaplan Meier Log Rank Method

[1193] In Example 15, the Likelihood Ratio test was used for analysis to assess cutoff values. This example shows that there are other methods to demonstrate or establish the ability of the assay to identify subjects likely to benefit from treatment with a soluble hyaluronidase. In this Example a Log Rank (KM) method is employed using the same data. Using either a Log Rank or Likelihood Ratio test results in a significant p-value at the cutoff.

[1194] Applied Potential Clinical Significance:

[1195] Significance of treatment effect, whether a treatment effect meets clinically meaningful benefit, and the significance of meeting that benefit, are assessed with data from clinical trial endpoints using survival analysis methods. Examples of established clinical trial endpoints such as OS, PFS, and ORR are described in Example 9. Significance of treatment effect is calculated using a Kaplan-Meier Log Rank function as described in Example 9, section A.5 of this patent. One assess clinically meaningful benefit along with statistical significance.

[1196] Applied Potential Clinically Meaningful Benefit:

[1197] One way to demonstrate the potential clinical utility of an investigational biomarker is to show that its values at or beyond a specified cutoff may selectively enrich for a sub-population of patients with the potential to respond beneficially to the therapeutic product when compared to the control arm. The relative fraction of all subjects that potentially can be treated as identified by the biomarker cutoff in Equation 1 (described above). Table 11 contains a summary of the definitions for statistical significance and clinical benefit. Biomarker cutoffs were optimized for meeting or exceeding clinical benefit in Log-Rank median survival difference and/or Hazard Ratio (HR), as described in Example 9, section A.S. Confidence intervals for clinical benefit had to be considered significant. Including these additional criteria ensures that there is less than a 5% Type I error; that is, the chance of declaring a significant result (in terms of hazard ratio and/or Kaplan-Meier median survival difference) when the true result is not significant. Confidence intervals were LOESS-fit with a smoothing parameter of 0.3 to aid in the assessment of the trend when benefit was no longer statistically significant, and were reported as such. The LOESS algorithm is a local regression using weighted linear least squares and a 2nd degree polynomial model. The LOESS values were calculated using the R library “ggplot2”, using the “geom_smooth” function (Software versions described above in the detailed description).

TABLE 11
Statistical Significance and Clinical Benefit definitions and requirements

| | Statistical | Clinically Meaningful Benefit | | | Clinically Meaningful Benefit | | |
|---|---|---|---|---|---|---|---|
| | Significance | using HR | | | using KM Median Difference | | |
| End- | Log Rank | Proportional | Proportional | Loess-fit | KM Median | KM Median | LOESS-fit |
| point | P-value | Hazard Ratio | Hazard Ratio | 95% Confidence | Difference | Difference | Bootstrapped |
| | upper | (Low Case) | (Base Case) | Interval | between Arms | between Arms | 95% Confidence |
| | limit | | | Upper Limit | (PAG-AG, | (PAG-AG, | Interval |
| | | | | | Low Case) | Base Case) | Lower Limit |
| OS | 0.05 | 0.79 | 0.67 | 1 | 2.3 mo | 4.2 mo | 0 mo |
| PFS | 0.05 | 0.70 | 0.59 | 1 | 2.4 mo | 3.9 mo | 0 mo |

[1198] The three cutoff scenarios, described in Example 15, were tested. These indicated increased patient benefit using the biomarker. The results are summarized in Table 12, and depicted in FIGS. 15A-15D, 16A-16D, and 17A-17D.

[1199] Scenario 1:

[1200] OS cutoff at largest predicted patient prevalence meeting desired potential clinical benefits. Two forms of clinical benefit must be met or exceeded, and their confidence intervals must lie within a specified range to be considered significant.

[1201] Data used: 109-202 Stage 2, Intent to Treat

[1202] The biomarker cutoff was defined as where the OS log-rank p-value is significant (<0.05), and for the largest fraction of potential fraction of subjects with potential to treat where at least one of the following conditions are satisfied:
[1203] 1) OS median survival ≥4.2 months (base case), and OS median survival 95% CI>0, and OS hazard ratio (HR)≤0.79 (low case), and OS hazard ratio (HR) 95% CI>0.
[1204] 2) OS median survival ≥2.3 months (low case), and OS median survival 95% CI>0, and OS hazard ratio (HR)≤0.67 (base case), and OS hazard ratio (HR) 95% CI>0.

[1205] In FIGS. 15A-15D, it is shown that condition 2 was satisfied at a biomarker cutoff of Nordic Ratio=0.38. This indicates that using a Nordic Ratio cutoff of 0.38 (p-value=0.016), 63% of the patient population (The point on FIG. 15A intersecting with vertical line from cutoff) could potentially see 2.3 months median survival difference (95% CI: 0.0-9.7) and an HR of 0.46 (95% CI: 0.24-0.88) using PVHA treatment when compared to the control group. Additional potential benefit may be possible if the cutoff is increased, but it comes at the cost of reducing the fraction of subjects with potential to be treated.

[1206] Scenario 2:

[1207] PFS cutoff at largest predicted fraction of subjects with potential to treat meeting desired clinical benefits. Two forms of clinical benefit must be met or exceeded, and their confidence intervals must lie within a specified range to be considered significant.

[1208] Data used: 109-202 Stages 1&2, Intent to Treat

[1209] The biomarker cutoff was defined as where the PFS log-rank p-value is significant (<0.05), and for the largest fraction of potential responders where at least one of the following conditions are satisfied:
[1210] 1) PFS median survival ≥3.9 months (base case), and PFS median survival 95% CI>0, and PFS hazard ratio (HR)≤0.70 (low case), and PFS hazard ratio (HR) 95% CI>0.
[1211] 2) PFS median survival ≥2.4 months (low case), and PFS median survival 95% CI>0, and PFS hazard ratio (HR)≤0.59 (base case), and PFS hazard ratio (HR) 95% CI>0.

[1212] In FIGS. 16A-16D, it is shown that condition 2 was satisfied at a biomarker cutoff of Nordic Ratio=0.45 (p-value=0.0030). This indicates that using a Nordic Ratio cutoff of 0.45, 55% of the patient population (The point on FIG. 16, part A intersecting with vertical line from cutoff) could potentially see 2.6 months median survival difference (95% CI: 0.0-5.3) and an HR of 0.48 (95% CI: 0.29-0.79) using PVHA treatment when compared to the control. Additional potential benefit may be possible if the cutoff is increased, but it comes at the cost of reducing the fraction of subjects with potential to be treated.

[1213] Scenario 3:

[1214] Predicted clinical benefits in PFS at the OS cutoff from scenario 1.

[1215] Data used: 109-202 Stages and 2, Intent to Treat

[1216] The potential statistical significance and potential clinical benefit for PFS was determined at the optimal OS cutoff calculated in Scenario 1 (Nordic Ratio=0.38). PFS log-rank p-value is significant (p-value=0.020). It is observed in FIG. 17A that 63% of the patient population (The point on FIG. 3, part A intersecting with vertical line from cutoff) could likely see 1.4 months median survival difference (95% CI: 0.0-4.5) and an HR of 0.56 (95% CI: 0.35-0.91) using treatment when compared to the control arm. Additional potential benefit is possible if the cutoff is increased, but that also reduces the fraction of subjects with potential to benefit from treatment.

TABLE 12
Results Summary

| | | | | | | | Median Survival |
|---|---|---|---|---|---|---|---|
| | | | | | HR Potential | | Potential |
| | | | | | Clinically | | Clinically |
| | | Potential | p- | | meaningful | KM Median | meaningful |
| Scenario | Cutoff | to Treat | value | HR | benefit | Survival | benefit |
| 1) OS | 0.38 | 63% | 0.016 | 0.46 (95% | Base case | 2.3 mo (95% | Low case |
| | | | | CI: 0.24-0.88) | | CI: 0.0-9.7) | |
| 2) PFS | 0.45 | 55% | 0.0030 | 0.48 (95% | Base case | 2.6 mo (95% | Low case |
| | | | | CI: 0.29-0.79) | | CI: 0.0-5.3) | |
| 3) PFS at | 0.38 | 63% | 0.017 | 0.56 (95% | Base case | 1.4 mo (95% | Minimal benefit |
| OS cutoff | | | | CI: 0.35-0.91) | | CI: 0.0-4.5) | not met |

[1217] These Examples, including the Figures, show examples of potential (predicted) clinical benefit that extend over a range of cutoff values in the context of PEGPH20 (PVHA) treatment. For example, it can be shown to have clinical benefit PFS and OS at the Median (50% of patients predicted to benefit from treatment).

[1218] Since modifications will be apparent to those of skill in this art, it is intended that this invention be limited only by the scope of the appended claims.

The application's sequence listing, which the Patent Office published only in electronic form, follows.

SEQUENCE LISTING (277 sequences)

SEQ ID NO: 1 - protein, 509 aa, Homo sapiens
  precursor human PH20
MGVLKFKHIFFRSFVKSSGVSQIVFTFLLIPCCLTLNFRAPPVIPNVPFLWAWNAPSEFCLGKFDEPLDMSLFSFIGSPRINATGQGVTIFYVDRLGYYPYIDSITGVTVNGGIPQKISLQDHLDKAKKDITFYMPVDNLGMAVIDWEEWRPTWARNWKPKDVYKNRSIELVQQQNVQLSLTEATEKAKQEFEKAGKDFLVETIKLGKLLRPNHLWGYYLFPDCYNHHYKKPGYNGSCFNVEIKRNDDLSWLWNESTALYPSIYLNTQQSPVAATLYVRNRVREAIRVSKIPDAKSPLPVFAYTRIVFTDQVLKFLSQDELVYTFGETVALGASGIVIWGTLSIMRSMKSCLLLDNYMETILNPYIINVTLAAKMCSQVLCQEQGVCIRKNWNSSDYLHLNPDNFAIQLEKGGKFTVRGKPTLEDLEQFSEKFYCSCYSTLSCKEKADVKDTDAVDVCIADGVCIDAFLKPPMETEEPQIFYNASPSTLSATMFIVSILFLIISSVASL

SEQ ID NO: 2 - protein, 474 aa, Homo sapiens
  Mature PH20
LNFRAPPVIPNVPFLWAWNAPSEFCLGKFDEPLDMSLFSFIGSPRINATGQGVTIFYVDRLGYYPYIDSITGVTVNGGIPQKISLQDHLDKAKKDITFYMPVDNLGMAVIDWEEWRPTWARNWKPKDVYKNRSIELVQQQNVQLSLTEATEKAKQEFEKAGKDFLVETIKLGKLLRPNHLWGYYLFPDCYNHHYKKPGYNGSCFNVEIKRNDDLSWLWNESTALYPSIYLNTQQSPVAATLYVRNRVREAIRVSKIPDAKSPLPVFAYTRIVFTDQVLKFLSQDELVYTFGETVALGASGIVIWGTLSIMRSMKSCLLLDNYMETILNPYIINVTLAAKMCSQVLCQEQGVCIRKNWNSSDYLHLNPDNFAIQLEKGGKFTVRGKPTLEDLEQFSEKFYCSCYSTLSCKEKADVKDTDAVDVCIADGVCIDAFLKPPMETEEPQIFYNASPSTLSATMFIVSILFLIISSVASL

SEQ ID NO: 3 - protein, 482 aa, Homo sapiens
  precursor PH20 1-482
MGVLKFKHIFFRSFVKSSGVSQIVFTFLLIPCCLTLNFRAPPVIPNVPFLWAWNAPSEFCLGKFDEPLDMSLFSFIGSPRINATGQGVTIFYVDRLGYYPYIDSITGVTVNGGIPQKISLQDHLDKAKKDITFYMPVDNLGMAVIDWEEWRPTWARNWKPKDVYKNRSIELVQQQNVQLSLTEATEKAKQEFEKAGKDFLVETIKLGKLLRPNHLWGYYLFPDCYNHHYKKPGYNGSCFNVEIKRNDDLSWLWNESTALYPSIYLNTQQSPVAATLYVRNRVREAIRVSKIPDAKSPLPVFAYTRIVFTDQVLKFLSQDELVYTFGETVALGASGIVIWGTLSIMRSMKSCLLLDNYMETILNPYIINVTLAAKMCSQVLCQEQGVCIRKNWNSSDYLHLNPDNFAIQLEKGGKFTVRGKPTLEDLEQFSEKFYCSCYSTLSCKEKADVKDTDAVDVCIADGVCIDAFLKPPMETEEPQIFY

SEQ ID NO: 4 - protein, 447 aa, Homo sapiens [sequence omitted]

SEQ ID NO: 5 - protein, 446 aa, Homo sapiens
  PH20 36-481
LNFRAPPVIPNVPFLWAWNAPSEFCLGKFDEPLDMSLFSFIGSPRINATGQGVTIFYVDRLGYYPYIDSITGVTVNGGIPQKISLQDHLDKAKKDITFYMPVDNLGMAVIDWEEWRPTWARNWKPKDVYKNRSIELVQQQNVQLSLTEATEKAKQEFEKAGKDFLVETIKLGKLLRPNHLWGYYLFPDCYNHHYKKPGYNGSCFNVEIKRNDDLSWLWNESTALYPSIYLNTQQSPVAATLYVRNRVREAIRVSKIPDAKSPLPVFAYTRIVFTDQVLKFLSQDELVYTFGETVALGASGIVIWGTLSIMRSMKSCLLLDNYMETILNPYIINVTLAAKMCSQVLCQEQGVCIRKNWNSSDYLHLNPDNFAIQLEKGGKFTVRGKPTLEDLEQFSEKFYCSCYSTLSCKEKADVKDTDAVDVCIADGVCIDAFLKPPMETEEPQIF

SEQ ID NO: 6 - protein, 445 aa, Homo sapiens
  PH20 36-480
LNFRAPPVIPNVPFLWAWNAPSEFCLGKFDEPLDMSLFSFIGSPRINATGQGVTIFYVDRLGYYPYIDSITGVTVNGGIPQKISLQDHLDKAKKDITFYMPVDNLGMAVIDWEEWRPTWARNWKPKDVYKNRSIELVQQQNVQLSLTEATEKAKQEFEKAGKDFLVETIKLGKLLRPNHLWGYYLFPDCYNHHYKKPGYNGSCFNVEIKRNDDLSWLWNESTALYPSIYLNTQQSPVAATLYVRNRVREAIRVSKIPDAKSPLPVFAYTRIVFTDQVLKFLSQDELVYTFGETVALGASGIVIWGTLSIMRSMKSCLLLDNYMETILNPYIINVTLAAKMCSQVLCQEQGVCIRKNWNSSDYLHLNPDNFAIQLEKGGKFTVRGKPTLEDLEQFSEKFYCSCYSTLSCKEKADVKDTDAVDVCIADGVCIDAFLKPPMETEEPQI

SEQ ID NO: 7 - protein, 444 aa, Homo sapiens
  PH20 36-479
LNFRAPPVIPNVPFLWAWNAPSEFCLGKFDEPLDMSLFSFIGSPRINATGQGVTIFYVDRLGYYPYIDSITGVTVNGGIPQKISLQDHLDKAKKDITFYMPVDNLGMAVIDWEEWRPTWARNWKPKDVYKNRSIELVQQQNVQLSLTEATEKAKQEFEKAGKDFLVETIKLGKLLRPNHLWGYYLFPDCYNHHYKKPGYNGSCFNVEIKRNDDLSWLWNESTALYPSIYLNTQQSPVAATLYVRNRVREAIRVSKIPDAKSPLPVFAYTRIVFTDQVLKFLSQDELVYTFGETVALGASGIVIWGTLSIMRSMKSCLLLDNYMETILNPYIINVTLAAKMCSQVLCQEQGVCIRKNWNSSDYLHLNPDNFAIQLEKGGKFTVRGKPTLEDLEQFSEKFYCSCYSTLSCKEKADVKDTDAVDVCIADGVCIDAFLKPPMETEEPQ

SEQ ID NO: 8 - protein, 443 aa, Homo sapiens
  PH20 36-478
LNFRAPPVIPNVPFLWAWNAPSEFCLGKFDEPLDMSLFSFIGSPRINATGQGVTIFYVDRLGYYPYIDSITGVTVNGGIPQKISLQDHLDKAKKDITFYMPVDNLGMAVIDWEEWRPTWARNWKPKDVYKNRSIELVQQQNVQLSLTEATEKAKQEFEKAGKDFLVETIKLGKLLRPNHLWGYYLFPDCYNHHYKKPGYNGSCFNVEIKRNDDLSWLWNESTALYPSIYLNTQQSPVAATLYVRNRVREAIRVSKIPDAKSPLPVFAYTRIVFTDQVLKFLSQDELVYTFGETVALGASGIVIWGTLSIMRSMKSCLLLDNYMETILNPYIINVTLAAKMCSQVLCQEQGVCIRKNWNSSDYLHLNPDNFAIQLEKGGKFTVRGKPTLEDLEQFSEKFYCSCYSTLSCKEKADVKDTDAVDVCIADGVCIDAFLKPPMETEEP

SEQ ID NO: 9 - protein, 442 aa, Homo sapiens
  PH20 36-477
LNFRAPPVIPNVPFLWAWNAPSEFCLGKFDEPLDMSLFSFIGSPRINATGQGVTIFYVDRLGYYPYIDSITGVTVNGGIPQKISLQDHLDKAKKDITFYMPVDNLGMAVIDWEEWRPTWARNWKPKDVYKNRSIELVQQQNVQLSLTEATEKAKQEFEKAGKDFLVETIKLGKLLRPNHLWGYYLFPDCYNHHYKKPGYNGSCFNVEIKRNDDLSWLWNESTALYPSIYLNTQQSPVAATLYVRNRVREAIRVSKIPDAKSPLPVFAYTRIVFTDQVLKFLSQDELVYTFGETVALGASGIVIWGTLSIMRSMKSCLLLDNYMETILNPYIINVTLAAKMCSQVLCQEQGVCIRKNWNSSDYLHLNPDNFAIQLEKGGKFTVRGKPTLEDLEQFSEKFYCSCYSTLSCKEKADVKDTDAVDVCIADGVCIDAFLKPPMETEE

SEQ ID NO: 10 - protein, 450 aa, Bos taurus
  hyaluronidase
MRPFSLEVSLHLPWAMAAHLLPVCTLFLNLLSMTQGSRDPVVPNQPFTTIWNANTEWCMKKHGVDVDISIFDVVTNPGQTFRGPNMTIFYSSQLGTYPYYTSAGEPVFGGLPQNASLNAHLARTFQDILAAMPEPRFSGLAVIDWEAWRPRWAFNWDTKDIYRQRSRALVQKQHPDWLAPRVEAAAQDQFEGAAEEWMAGTLKLGQALRPQGLWGFYNFPECYNYDFKSPNYTGRCPLNICAQNDQLGWLWGQSRALYPSIYLPAALEGTKKTQMFVQHRVAEAFRVAAGAGDPKLPVLPYMQLFYDMTNHFLPAEELEHSLGESAAQGAAGVVLWVSWLSTSTKESCQAIKEYVDTTLGPSILNVTSGARLCSQVLCSGHGRCARRPSYPKARLILNSTSFSIKPTPGGGPLTLQGALSLEDRLRMAVEFECRCYRGWRGTRCEQWGMW

SEQ ID NO: 11 - protein, 553 aa, Bos taurus
  Precursor cow PH20
MRMLRRHHISFRSFAGSSGTPQAVFTFLLLPCCLALDFRAPPLISNTSFLWAWNAPVERCVNRRFQLPPDLRLFSVKGSPQKSATGQFITLFYADRLGYYPHIDEKTGKTVFGGIPQLGNLKSHMEKAKNDIAYYIPNDSVGLAVIDWENWRPTWARNWKPKDVYRDESVELVLQKNPQLSFPEASKIAKVDFETAGKSFMQETLKLGKLLRPNHLWGYYLFPDCYNHNHNQPTYNGNCPDVEKRRNDDLEWLWKESTALFPSVYLNIRLKSTQNAALYVRNRVQEAIRLSKIASVESPLPVFVYARPVFTDGSSTYLSQGDLVNSVGEIVSLGASGIIMWGSLNLSLSMQSCMNLGTYLNTTLNPYIINVTLAAKMCSQVLCHNEGVCTRKHWNSSDYLHLNPMNFAIQTGEGGKYTVPGTVTLEDLQKFSDTFYCSCYANIHCKKRVDIKNVHSVNVCMAEDICIDSPVKLQPSDHSSSQEASTTTFSSISPSTTTATVSPCTPEKHSPECLKVRCSEVIPNVTQKACQSVKLKNISYQSPIQNIKNQTTY

SEQ ID NO: 12 - protein, 331 aa, Vespula vulgaris
  hyaluronidase A
SERPKRVFNIYWNVPTFMCHQYDLYFDEVTNFNIKRNSKDDFQGDKIAIFYDPGEFPALLSLKDGKYKKRNGGVPQEGNITIHLQKFIENLDKIYPNRNFSGIGVIDFERWRPIFRQNWGNMKIHKNFSIDLVRNEHPTWNKKMIELEASKRFEKYARFFMEETLKLAKKTRKQADWGYYGYPYCFNMSPNNLVPECDVTAMHENDKMSWLFNNQNVLLPSVYVRQELTPDQRIGLVQGRVKEAVRISNNLKHSPKVLSYWWYVYQDETNTFLTETDVKKTFQEIVINGGDGIIIWGSSSDVNSLSKCKRLQDYLLTVLGPIAINVTEAVN

SEQ ID NO: 13 - protein, 340 aa, Vespula vulgaris
  hyaluronidase B
DRTIWPKKGFSIYWNIPTHFCHNFGVYFKELKQFNIKYNSMNNFRGETISLFYDPGNFPSMVLLKNGTYEIRNEGVPQKGNLTIHLEQFTKELDEIYPKKIAGGIGVIHFHNWRPIFRRNVDNLKINKDISIDLVRKEHPKWDKSMIEKEASNRFETSAKIFMEKTLKLAKEIRKKTEWGYHGYPHCLSGSTDKPSFDCDALSMSENDKMSWLFNNQNVLLPSIYLKNVLKPDEKIHLVQERLKEAIRISKNFKHLPKVLPYWWYTYQDKESIFLTEADVKNTFKEILTNGADGIIIWGVSYELTDRKRCEKLKEYLMKILGPIAFKVTKAVKENTPLNF

SEQ ID NO: 14 - protein, 382 aa, Apis mellifera
  hyaluronidase
MSRPLVITEGMMIGVLLMLAPINALLLGFVQSTPDNNKTVREFNVYWNVPTFMCHKYGLRFEEVSEKYGILQNWMDKFRGEEIAILYDPGMFPALLKDPNGNVVARNGGVPQLGNLTKHLQVFRDHLINQIPDKSFPGVGVIDFESWRPIFRQNWASLQPYKKLSVEVVRREHPFWDDQRVEQEAKRRFEKYGQLFMEETLKAAKRMRPAANWGYYAYPYCYNLTPNQPSAQCEATTMQENDKMSWLFESEDVLLPSVYLRWNLTSGERVGLVGGRVKEALRIARQMTTSRKKVLPYYWYKYQDRRDTDLSRADLEATLRKITDLGADGFIIWGSSDDINTKAKCLQFREYLNNELGPAVKRIALNNNANDRLTVDVSVDQV

SEQ ID NO: 15 - protein, 331 aa, Dolichovespula maculata
  hyaluronidase
SERPKRVFNIYWNVPTFMCHQYGLYFDEVTNFNIKHNSKDDFQGDKISIFYDPGEFPALLPLKEGNYKIRNGGVPQEGNITIHLQRFIENLDKTYPNRNFNGIGVIDFERWRPIFRQNWGNMMIHKKFSIDLVRNEHPFWDKKMIELEASKRFEKYARLFMEETLKLAKKTRKQADWGYYGYPYCFNMSPNNLVPDCDATAMLENDKMSWLFNNQNVLLPSVYIRHELTPDQRVGLVQGRVKEAVRISNNLKHSPKVLSYWWYVYQDDTNTFLTETDVKKTFQEIAINGGDGIIIWGSSSDVNSLSKCKRLREYLLTVLGPITVNVTETVN

SEQ ID NO: 16 - protein, 367 aa, Polistes annularis
  hyaluronidase
YVSLSPDSVFNIITDDISHQILSRSNCERSKRPKRVFSIYWNVPTFMCHQYGMNFDEVTDFNIKHNSKDNFRGETISIYYDPGKFPALMPLKNGNYEERNGGVPQRGNITIHLQQFNEDLDKMTPDKNFGGIGVIDFERWKPIFRQNWGNTEIHKKYSIELVRKEHPKWSESMIEAEATKKFEKYARYFMEETLKLAKKTRKRAKWGYYGFPYCYNVTPNNPGPDCDAKATIENDRLSWMYNNQEILFPSVYVRHEQKPEERVYLVQGRIKEAVRISNNLEHSPSVLAYWWYVYQDKMDIYLSETDVEKTFQEIVTNGGDGIIIWGSSSDVNSLSKCKRLREYLLNTLGPFAVNVTETVNGRSSLNF

SEQ ID NO: 17 - protein, 462 aa, Mus musculus
  hyaluronidase
MLGLTQHAQKVWRMKPFSPEVSPGSSPATAGHLLRISTLFLTLLELAQVCRGSVVSNRPFITVWNGDTHWCLTEYGVDVDVSVFDVVANKEQSFQGSNMTIFYREELGTYPYYTPTGEPVFGGLPQNASLVTHLAHTFQDIKAAMPEPDFSGLAVIDWEAWRPRWAFNWDSKDIYRQRSMELVQAEHPDWPETLVEAAAKNQFQEAAEAWMAGTLQLGQVLRPRGLWGYYGFPDCYNNDFLSLNYTGQCPVFVRDQNDQLGWLWNQSYALYPSIYLPAALMGTGKSQMYVRHRVQEALRVAIVSRDPHVPVMPYVQIFYEMTDYLLPLEELEHSLGESAAQGVAGAVLWLSSDKTSTKESCQAIKAYMDSTLGPFIVNVTSAALLCSEALCSGHGRCVRHPSYPEALLTLNPASFSIELTHDGRPPSLKGTLSLKDRAQMAMKFRCRCYRGWRGKWCDKRGM

SEQ ID NO: 18 - protein, 473 aa, Mus musculus
  Hyaluronidase 2
MRAGLGPIITLALVLEVAWAGELKPTAPPIFTGRPFVVAWNVPTQECAPRHKVPLDLRAFDVKATPNEGFFNQNITTFYYDRLGLYPRFDAAGTSVHGGVPQNGSLCAHLPMLKESVERYIQTQEPGGLAVIDWEEWRPVWVRNWQEKDVYRQSSRQLVASRHPDWPSDRVMKQAQYEFEFAARQFMLNTLRYVKAVRPQHLWGFYLFPDCYNHDYVQNWESYTGRCPDVEVARNDQLAWLWAESTALFPSVYLDETLASSVHSRNFVSFRVREALRVAHTHHANHALPVYVFTRPTYTRGLTGLSQVDLISTIGESAALGSAGVIFWGDSEDASSMETCQYLKNYLTQLLVPYIVNVSWATQYCSWTQCHGHGRCVRRNPSANTFLHLNASSFRLVPGHTPSEPQLRPEGQLSEADLNYLQKHFRCQCYLGWGGEQCQRNYKGAAGNASRAWAGSHLTSLLGLVAVALTWTL

SEQ ID NO: 19 - protein, 412 aa, Mus musculus
  hyalurinidase 3
MIMHLGLMMVVGLTLCLMHGQALLQVPEHPFSVVWNVPSARCKAHFGVHLPLDALGIVANHGQHFHGQNISIFYKNQFGLYPYFGPRGTAHNGGIPQAVSLDHHLARAAHQILHSLGSSFAGLAVLDWEEWYPLWAGNWGPHRQVYLAASWVWTQQMFPGLDPQEQLHKAHTSFEQAARALMEYTLQLGRTLRPSGLWGFYRYPACGNGWHKMASNYTGHCHAAITTQNTQLRWLWAASSALFPSIYLPPRLPLAYRQAFVRHRLEEAFRVALLEHSHPLPVLAYSRLTHRSSGRFLSLDDLMQTIGVSAALGTAGVVLWGDLSFSSSEEKCWRLHDYLVGTLGPYVINVTKADMACSHQRCHGHGRCARKDPGQMEAFLHLQPDDSLGAWNSFRCHCYSGWAGPTCLEPKP

SEQ ID NO: 20 - protein, 435 aa, Sus scrofa
  hyalauronidase
MAAHLLPICTLFLNLLSVAQGSRDPVVLNRPFTTIWNANTQWCLKRHGVDVDVSVFEVVVNPGQTFRGPNMTIFYSSQLGTYPYYTSAGEPVFGGLPQNASLDVHLNRTFKDILAAMPESNFSGLAVIDWEAWRPRWAFNWDAKDIYRQRSRALVQKQHPDWPAPWVEAAAQDQFQEAAQTWMAGTLKLGQTLRPHGLWGFYGFPDCYNYDFQSSNYTGQCPPGVSAQNDQLGWLWGQSRALYPSIYLPSALEGTNKTQLYVQHRVNEAFRVAAAAGDPNLPVLPYAQIFHDMTNRLLSREELEHSLGESAAQGAAGVVLWVSWENTRTKESCQSIKEYVDTTLGPFILNVTSGALLCSQAVCSGHGRCVRRPSHTEALPILNPSSFSIKPTPGGGPLTLQGALSLKDRVQMAEEFQCRCYPGWRGTWCEQQGTR

SEQ ID NO: 21 - protein, 419 aa, Sus scrofa
  hyaluronidase 3
MTMQLGLALVLGVAMCLGCGQPLLRAPERPFCVLWNVPSARCKARFGVHLPLEALGITANHGQRFHGQNITIFYKSQLGLYPYFGPRGTAHNGGIPQAVSLDHHLARAAYQIHRSLRPGFTGLAVLDWEEWCPLWAGNWGRRQAYQAASCAWAQRVYPNLDPQEQLCKARAGFEEAARALMEDTLRLGRMLRPHGLWGFYHYPACGNGWHGTASNYTGHCHAAALARNTQLYWLWAASSALFPSIYLPPGLPPAYHQAFVRYRLEEAFRVALVGHPHPLPVLAYARLTHRNSGRFLSQDELVQTIGVSAALGASGVVLWGDLSFSSSEEECWHLRGYLVGTLGPYVINVTRAAMACSHQRCHGHGRCAWQDPGQLKVFLHLHPGGSPGAWESFSCRCYWGWAGPTCQEPRPELGPEEAT

SEQ ID NO: 22 - protein, 449 aa, Rattus norvegicus
  hyaluronidase 1
MKPFSPEVSPDPCPATAAHLLRTYTLFLTLLELAQGCRGSMVSNRPFITVWNADTHWCLKDHGVDVDVSVFDVVANKEQNFQGPNMTIFYREELGTYPYYTPTGEPVFGGLPQNASLVTHLAHAFQDIKAAMPEPDFSGLAVIDWEAWRPRWAFNWDSKDIYQQRSMELVRAEHPDWPETLVEAEAQGQFQEAAEAWMAGTLQLGQVLRPRGLWGYYGFPDCYNYDFLSPNYTGQCSLSIHDQNDQLGWLWNQSYALYPSIYLPAALMGTGKSQMYVRYRVQEAFRLALVSRDPHVPIMPYVQIFYEKTDYLLPLEELEHSLGESAAQGAAGAVLWISSEKTSTKESCQAIKAYMDSTLGPFILNVTSAALLCSEALCSGRGRCVRHPSYPEALLTLSPASFSIEPTHDGRPLSLKGTLSLKDRAQMAMKFKCRCYRGWSGEWCKKQDM

SEQ ID NO: 23 - protein, 473 aa, Rattus norvegicus
  hyaluronidase 2
MRAGLGPIITLALVLEVAWASELKPTAPPIFTGRPFVVAWNVPTQECAPRHKVPLDLRAFDVEATPNEGFFNQNITTFYYDRLGLYPRFDAAGMSVHGGVPQNGSLCAHLPMLKEAVERYIQTQEPAGLAVIDWEEWRPVWVRNWQEKDVYRQSSRQLVASRHPDWPSDRIVKQAQYEFEFAARQFMLNTLRYVKAVRPQHLWGFYLFPDCYNHDYVQNWDSYTGRCPDVEVAQNDQLAWLWAENTALFPSVYLDKTLASSKHSRNFVSFRVQEALRVAHTHHANHALPVYVFTRPTYTRRLTELNQMDLISTIGESAALGSAGVIFWGDSVYASSMENCQNLKKYLTQTLVPYIVNVSWATQYCSWTQCHGHGRCVRRNPSASTFLHLSPSSFRLVPGRTPSEPQLRPEGELSEDDLSYLQMHFRCHCYLGWGGEQCQWNHKRAAGDASRAWAGAHLASLLGLVAMTLTWTL

SEQ ID NO: 24 - protein, 412 aa, Rattus norvegicus
  hyaluronidase 3
MITQLGLTLVVGLTLCLVHVQALLQVPEFPFSVLWNVPSARCKTRFGVHLPLDALGIIANHGQRFHGQNITIFYKNQFGLYPYFGPRGTAHNGGIPQAVSLDHHLAQAAHQILHNLGSSFAGLAVLDWEEWYPLWAGNWGTHRQVYQAASWAWAQQMFPDLNPQEQLHKAQTGFEQAARALMEHTLRLGQMLRPHGLWGFYRYPVCGNGWHNMASNYTGHCHPAIITRNTQLRWLWAASSALFPSIYLPPRLPPAYHQTFVRHRLEEAFRVALTGHAHPLPVLAYVRLTHRSSGRFLSLDDLMQTIGVSAALGAAGVVLWGDLSVSSSEEECWRLHDYLVGTLGPYVINVTKAATACSHQRCHGHGRCSWKDPGQMEAFLHLQPDDNLGAWKSFRCRCYLGWSGPTCLEPKP

SEQ ID NO: 25 - protein, 545 aa, Oryctolagus cuniculus
  Precursor rabbit PH20
MGVLKFKHIFFGSAVELSGVFQIVFIFLLIPCCLTANFRAPPVIPNVPFLWAWNAPTEFCLGKSGEPLDMSLFSLFGSPRKNKTGQGITIFYVDRLGYYPYIDPHTGAIVHGRIPQLGPLQQHLTKLRQEILYYMPKDNVGLAVIDWEEWLPTWLRNWKPKDIYRIKSIELVKSQHPQYNHSYATEKAKRDFEKAGKDFMEETLKLGRLLRPNHLWGYYLFPDCYNHHYDKPNLYKGSCFDIEKKRNDDLSWLWKESTALFPSVYLTSRARSATALSKLYVVRNRVHEAIRVSKIPDDKSPLPNFVYTRLVFTDQIFQFLSHHDLVYTIGEIVALGASGIVVWGSQSLARSMKSCLHLDNYMKTILNPYLINVTLAAKMCNQVLCQEQGVCTRKNWNPNDYLHLNPGNFAIQLGSNGTYKVDGKPTLTDLEQFSKNFQCSCYTNLNCKERTDMNNVRTVNVCAVENVCIDTNVGPQAVTYAPKEKKDVAHILSNTTSINSSTTMSLPFPRKHVSGCLLVLCMYSQYLNICYRLVAIGIQHGYYLK

SEQ ID NO: 26 - protein, 476 aa, Ovis aries
  hyaluronidase 2
MWTGLGPAVTLALVLVVAWATELKPTAPPIFTGRPFVVAWDVPTQDCGPRHKMPLDPKDMKAFDVQASPNEGFVNQNITIFYRDRLGMYPHFNSVGRSVHGGVPQNGSLWVHLEMLKGHVEHYIRTQEPAGLAVIDWEDWRPVWVRNWQDKDVYRRLSRQLVASHHPDWPPERIVKEAQYEFEFAARQFMLETLRFVKAFRPRHLWGFYLFPDCYNHDYVQNWETYTGRCPDVEVSRNDQLSWLWAESTALFPSVYLEETLASSTHGRNFVSFRVQEALRVADVHHANHALPVYVFTRPTYSRGLTGLSEMDLISTIGESAALGAAGVILWGDAGFTTSNETCRRLKDYLTRSLVPYVVNVSWAAQYCSWAQCHGHGRCVRRDPNAHTFLHLSASSFRLVPSHAPDEPRLRPEGELSWADRNHLQTHFRCQCYLGWGGEQCQWDRRRAAGGASGAWAGSHLTGLLAVAVLAFTWTS

SEQ ID NO: 27 - protein, 114 aa, Ovis aries
  PH20 partial sequence
LYVRNRVREAIRLSKIASVESPLPVFVYHRPVFTDGSSTYLSQGDLVNSVGEIVALGASGIIMWGSLNLSLTMQSCMNLGNYLNTTLNPYIINVTLAAKMCSQVLCQEQGVCIR

SEQ ID NO: 28 - protein, 414 aa, Pongo pygmaeus
  hyaluronidase 3
MTTRLGPALVLGVALCLGCGQPLPQVPERPFSVLWNVPSAHCKSRFGVHLPLNALGIIANRGQHFHGQNMTIFYKNQLGLYPYFGPKGTAHNGGIPQALPLDRHLALAAYQIHHSLRPGFAGPAVLDWEEWCPLWAGNWGRRRAYQAASWAWAQQVFPDLDPQEQLYKAYTGFEQAARALMEDTLRVAQALRPHGLWGFYHYPACGNGWHSMASNYTGRCHAATLARNTQLHWLWAASSALFPSIYLPPRLPPAHHQAFVRHRLEEAFRVALVGHLPVLAYVRLTHRRSGRFLSQDDLVQTIGVSAALGAAGVVLWGDLSLSSSEEECWHLHDYLVDTLGPYGINVTRAAMACSHQRCHGHGRCARRDPGQMEAFLHLWPDGSLGDWKSFSCHCYWGWAGPTCQEPRLGPKEAV

SEQ ID NO: 29 - protein, 510 aa, Macaca fascicularis
  Precursor Cynomolgus monkey PH20
MGVLKFKHIFFRSFVKSSGVSQIVFTFLLIPCCLTLNFRAPPIIPNVPFLWAWNAPSEFCLGKFNEPLDMSLFTLMGSPRINVTGQGVTIFYVDRLGYYPYIDLTTGVTVHGGIPQKVSLQDHLDKSKQDILFYMPVDNLGMAVIDWEEWRPTWARNWKPKDVYKNRSIELVQQQNVQLSLPQATDKAKQEFEKAGKDFMLETIKLGRSLRPNHLWGYYLFPDCYNHHYRKPGYNGSCFDVEIKRNDDLSWLWNESTALYPSIYLNTQQSVVVATLYVRNRVREAIRVSKIPDAKNPLPVFVYARLVFTDQVLKFLSREELVSTLGETVALGASGIVIWGSLSITRSMKSCLLLDTYMETILNPYIINVTLAAKMCSQVLCQEQGVCIRKDWNSSDYLHLNPDNFDIRLEKGGKFTVHGKPTVEDLEEFSEKFYCSCYTNLSCKEKADVKDTDAVDVCIADGVCIDASLKPPVETEGSPPIFYNTSSSTVSTTMFIVNILFLIISSVASL

SEQ ID NO: 30 - protein, 529 aa, Cavia porcellus
  Precursor guinea pig PH20
MGAFTFKHSFFGSFVECSGVLQTVFIFLLIPCCLADKRAPPLIPNVPLLWVWNAPTEFCIGGTNQPLDMSFFSIVGTPRKNITGQSITLYYVDRLGYYPYIDPHTGAIVHGGLPQLMNLQQHLRKSRQDILFYMPTDSVGLAVIDWEEWRPTWTRNWRPKDIYRNKSIELVKSQHPQYNHSYAVAVAKRDFERTGKAFMLETLKLGKSLRPSSLWGYYLFPDCYNTHFTKPNYDGHCPPIELQRNNDLQWLWNDSTALYPSVYLTSRVRSSQNGALYVRNRVHESIRVSKLMDDKNPLPIYVYIRLVFTDQTTTFLELDDLVHSVGEIVPLGVSGIIIWGSLSLTRSLVSCIGLENYMKGTLLPYLINVTLAAKMCGQVLCKNQGICTRKDWNTNTYLHLNATNFDIELQQNGKFVVHGKPSLEDLQEFSKNFHCSCYTNVACKDRLDVHNVRSVNVCTANNICIDAVLNFPSLDDDDEPPITDDTSQNQDSISDITSSAPPSSHILPKDLSWCLFLLSIFSQHWKYLL

SEQ ID NO: 31 - protein, 512 aa, Rattus norvegicus
  Precursor rat PH20
MGELQFKWLFWRSFAESGGTFQTVLIFLFIPYSLTVDYRATPVLSDTTFVWVWNVPTEACVENVTEPIDLSFFSLIGSPRKTAIGQPVTLFYVDRLGNYPHIDAQQTEHHGGIPQKGDLTTHLVKAKEDVERYIPTDKLGLAIIDWEEWRPTWMRNWTPKDIYRNKSIELVQAADPAINITEATVRAKAQFEGAAKEFMEGTLKLGKHIRPKHLWGFYLFPDCYNNKFQVDNYDGQCPDVEKKRNDDLDWLWKESTGLYPSVYLKKDLKSSRKATLYVRYRVLESIRVSKVSDESNPVPIFVYIRLVFTDHVSEYLLEDDLVNTIGEIVAQGTSGIIIWDAMSLAQRSAGCPILRQYMKTTLNPYIVNVTLAAKMCSQTLCKEKGMCSRKTESSDAYLHLDPSSFSINVTEAGKYEVLGKPEVKDLEYFSEHFKCSCFSKMTCEETSDMRSIQDVNVCMGDNVCIKATLGPNSAFHLLPGKGLLLMTTLAHILHHLPHDIFVFPWKMLVSTP

SEQ ID NO: 32 - protein, 512 aa, Mus musculus
  Precursor mouse PH20
MGELRFKHLFWGSFVESGGTFQTVLIFLLIPCSLTVDYRAAPILSNTTFLWIWNVPTERCVGNVNDPIDLSFFSLIGSPRKTATGQPVTLFYVDRLGLYPHIDANQAEHYGGIPQRGDYQAHLRKAKTDIEHYIPDDKLGLAIIDWEEWRPTWLRNWKPKDNYRNKSIELVQSTNPGLSITEATQKAIQQFEEAGRKFMEGTLHLGKFLRPNQLWGYYLFPDCYNNKFQDPKYDGQCPAVEKKRNDNLKWLWKASTGLYPSVYLKKDLKSNRQATLYVRYRVVEAIRVSKVGNASDPVPIFVYIRLVFTDRTSEYLLEDDLVNTIGEIVALGTSGIIIWDAMSLAQRAAGCPILHKYMQTTLNPYIVNVTLAAKMCSQTLCNEKGMCSRRKESSDVYLHLNPSHFDIMLTETGKYEVLGNPRVGDLEYFSEHFKCSCFSRMTCKETSDVKNVQDVNVCVGDNVCIKAKVEPNPAFYLLPGKSLLFMTTLGHVLYHLPQDIFVFPRKTLVSTP

SEQ ID NO: 33 - protein, 807 aa, Staphylococcus aureus
  hyaluronidase
MTYRIKKWQKLSTITLLMAGVITLNGGEFRSVDKHQIAVADTNVQTPDYEKLRNTWLDVNYGYDKYDENNPDMKKKFDATEKEATNLLKEMKTESGRKYLWSGAETLETNSSHMTRTYRNIEKIAEAMRNPKTTLNTDENKKKVKDALEWLHKNAYGKEPDKKVKELSENFTKTTGKNTNLNWWDYEIGTPKSLTNTLILLNDQFSNEEKKKFTAPIKTFAPDSDKILSSVGKAELAKGGNLVDISKVKLLECIIEEDKDMMKKSIDSFNKVFTYVQDSATGKERNGFYKDGSYIDHQDVPYTGAYGVVLLEGISQMMPMIKETPFNDKTQNDTTLKSWIDDGFMPLIYKGEMMDLSRGRAISRENETSHSASATVMKSLLRLSDAMDDSTKAKYKKIVKSSVESDSSYKQNDYLNSYSDIDKMKSLMTDNSISKNGLTQQLKIYNDMDRVTYHNKDLDFAFGLSMTSKNVARYESINGENLKGWHTGAGMSYLYNSDVKHYHDNFWVTADMKRLSGTTTLDNEILKDTDDKKSSKTFVGGTKVDDQHASIGMDFENQDKTLTAKKSYFILNDKIVFLGTGIKSTDSSKNPVTTIENRKANGYTLYTDDKQTTNSDNQENNSVFLESTDTKKNIGYHFLNKPKITVKKESHTGKWKEINKSQKDTQKTDEYYEVTQKHSNSDNKYGYVLYPGLSKDVFKTKKDEVTVVKQEDDFHVVKDNESVWAGVNYSNSTQTFDINNTKVEVKAKGMFILKKKDDNTYECSFYNPESTNSASDIESKISMTGYSITNKNTSTSNESGVHFELTK

SEQ ID NO: 34 - protein, 371 aa, Streptococcus pyogenes bacteriophage H4489A
  hyaluronidase
MTENIPLRVQFKRMSADEWARSDVILLEGEIGFETDTGFAKFGDGQNTFSKLKYLTGPKGPKGDTGLQGKTGGTGPRGPAGKPGTTDYDQLQNKPDLGAFAQKEETNSKITKLESSKADKSAVYSKAESKIELDKKLSLTGGIVTGQLQFKPNKSGIKPSSSVGGAINIDMSKSEGAAMVMYTNKDTTDGPLMILRSDKDTFDQSAQFVDYSGKTNAVNIVMRQPSAPNFSSALNITSANEGGSAMQIRGVEKALGTLKITHENPNVEAKYDENAAALSIDIVKKQKGGKGTAAQGIYINSTSGTAGKMLRIRNKNEDKFYVGPDGGFHSGANSTVAGNLTVKDPTSGKHAATKDYVDEKIAELKKLILKK

SEQ ID NO: 35 - protein, 1628 aa, Clostridium perfringens
  hyaluronidase
MNKNIRKIITSTVLAAMTISVLPSNLVVFATDGITENFYEIYPKPQEISYSGGEFQISDEINIVYDDGIDTYTKKRVDEVLEASNLEATVSNEIVPGKTNFLVGINESGGVVDNYFNKNIPHDESFFDEKMDANIVSVKDGVIGVIGEDTDSAFYGVTTLKHVFNQLEEGNKIQSFRADDYAEVAHRGFIEGYYGNPWSNEDRAELMKFGGDYKLNQYVFAPKDDPYHNSKWRDLYPEEKLSEIKKLAQVGNETKNRYVYALHPFMNNPVRFDTEENYQNDLGVIKAKFTQLLENDVRQFAILADDASAPAQGASMYVKLLTDLTRWLEEQQSTYPDLKTDLMFCPSDYYGNGSSAQLKELNKAEDNVSIVMTGGRIWGEVDENFANNFMNNISTEGHPGRAPFFWINWPCSDNSKQHLIMGGNDTFLHPGVDPSKIDGIVLNPMQQAEANKSALFAIADYAWNIWDNKEEADENWNDSFKYMDHGTAEETNSSLALREISKHMINQNMDGRVRPLQESVELAPKLEAFKQKYDSGASIKEDALELIAEFTNLQKAADYYKNNPGNERTRDQIIYWLNCWEDTMDAAIGYLKSAIAIEEGDDEAAWANYSEAQGAFEKSKTYGFHYVDHTEYAEVGVQHIVPFIKSMGQNLSVVIGSIVDPNRIIATYISNRQDAPTGNPDNIFDNNASTELVYKNPNRIDVGTYVGVKYSNPITLNNVEFLMGANSNPNDTMQKAKIQYTVDGREWIDLEEGVEYTMPGAIKVENLDLKVRGVRLIATEARENTWLGVRDINVNKKEDSNSGVEFNPSLIRSESWQVYEGNEANLLDGDDNTGVWYKTLNGDTSLAGEFIGLDLGKEIKLDGIRFVIGKNGGGSSDKWNKFKLEYSLDNESWTTIKEYDKTGAPAGKDVIEESFETPISAKYIRLTNMENINKWLTFSEFAIISDELENAGNKENVYTNTELDLLSLAKEDVTKLIPTDDISLNHGEYIGVKLNRIKDLSNINLEISNDTGLKLQSSMNGVEWTEITDKNTLEDGRYVRLINTSNEAVNFNLTKFEVNSNEVYEPSLVDAYVGDDGAKKAVDGDLKTRVKFLGAPSTGDTIVYDLGQEILVDNLKYVVLDTEVDHVRDGKIQLSLDGETWTDAITIGDGVENGVDDMFSTPLKNGYKHGNQSGGIVPIDSAYVEGDNLNQKARYVRILFTAPYRHRWTVINELMINNGEYISTVNDPTYISNPIEERGFAPSNLRDGNLTTSYKPNTNNGEISEGSITYRLSEKTDVRKVTIVQSGSSISNAKVMARVGDGSENVTDQWVQLGTLSNSLNEFINRDYNNIYEIKIEWTDVAPNIYEIITLNQEFEFPVNDSLKAKYDELINLSGDEYTLSSFETLKEALNEAKSILDDSNSSQKKIDKALEKLNKAEERLDLRATDFEDFNKVLTLGNSLVEEEYTAESWALFSEVLEAANEANKNKADYTQDQINQIVIDLDASIKALVKETPEVDKTNLGELINQGKSLLDESVEGFNVGEYHKGAKDGLTVEINKAEEVFNKEDATEEEINLAKESLEGAIARFNSLLIEESTGDFNGNGKIDIGDLAMVSKNIGSTTNTSLDLNKDGSIDEYEISFINHRILN

SEQ ID NO: 36 - protein, 435 aa, Homo sapiens
  Hyaluronidase-1 [Precursor]
MAAHLLPICALFLTLLDMAQGFRGPLLPNRPFTTVWNANTQWCLERHGVDVDVSVFDVVANPGQTFRGPDMTIFYSSQLGTYPYYTPTGEPVFGGLPQNASLIAHLARTFQDILAAIPAPDFSGLAVIDWEAWRPRWAFNWDTKDIYRQRSRALVQAQHPDWPAPQVEAVAQDQFQGAARAWMAGTLQLGRALRPRGLWGFYGFPDCYNYDFLSPNYTGQCPSGIRAQNDQLGWLWGQSRALYPSIYMPAVLEGTGKSQMYVQHRVAEAFRVAVAAGDPNLPVLPYVQIFYDTTNHFLPLDELEHSLGESAAQGAAGVVLWVSWENTRTKESCQAIKEYMDTTLGPFILNVTSGALLCSQALCSGHGRCVRRTSHPKALLLLNPASFSIQLTPGGGPLSLRGALSLEDQAQMAVEFKCRCYPGWQAPWCERKSMW

SEQ ID NO: 37 - protein, 473 aa, Homo sapiens
  Hyaluronidase-2 [Precursor]
MRAGPGPTVTLALVLAVAWAMELKPTAPPIFTGRPFVVAWDVPTQDCGPRLKVPLDLNAFDVQASPNEGFVNQNITIFYRDRLGLYPRFDSAGRSVHGGVPQNVSLWAHRKMLQKRVEHYIRTQESAGLAVIDWEDWRPVWVRNWQDKDVYRRLSRQLVASRHPDWPPDRIVKQAQYEFEFAAQQFMLETLRYVKAVRPRHLWGFYLFPDCYNHDYVQNWESYTGRCPDVEVARNDQLAWLWAESTALFPSVYLDETLASSRHGRNFVSFRVQEALRVARTHHANHALPVYVFTRPTYSRRLTGLSEMDLISTIGESAALGAAGVILWGDAGYTTSTETCQYLKDYLTRLLVPYVVNVSWATQYCSRAQCHGHGRCVRRNPSASTFLHLSTNSFRLVPGHAPGEPQLRPVGELSWADIDHLQTHFRCQCYLGWSGEQCQWDHRQAAGGASEAWAGSHLTSLLALAALAFTWTL

SEQ ID NO: 38 - protein, 417 aa, Homo sapiens
  Hyaluronidase-3 [Precursor]
MTTQLGPALVLGVALCLGCGQPLPQVPERPFSVLWNVPSAHCEARFGVHLPLNALGIIANRGQHFHGQNMTIFYKNQLGLYPYFGPRGTAHNGGIPQALPLDRHLALAAYQIHHSLRPGFAGPAVLDWEEWCPLWAGNWGRRRAYQAASWAWAQQVFPDLDPQEQLYKAYTGFEQAARALMEDTLRVAQALRPHGLWGFYHYPACGNGWHSMASNYTGRCHAATLARNTQLHWLWAASSALFPSIYLPPRLPPAHHQAFVRHRLEEAFRVALVGHRHPLPVLAYVRLTHRRSGRFLSQDDLVQSIGVSAALGAAGVVLWGDLSLSSSEEECWHLHDYLVDTLGPYVINVTRAAMACSHQRCHGHGRCARRDPGQMEAFLHLWPDGSLGDWKSFSCHCYWGWAGPTCQEPRPGPKEAV

SEQ ID NO: 39 - protein, 481 aa, Homo sapiens
  Hyaluronidase-4
MKVLSEGQLKLCVVQPVHLTSWLLIFFILKSISCLKPARLPIYQRKPFIAAWNAPTDQCLIKYNLRLNLKMFPVIGSPLAKARGQNVTIFYVNRLGYYPWYTSQGVPINGGLPQNISLQVHLEKADQDINYYIPAEDFSGLAVIDWEYWRPQWARNWNSKDVYRQKSRKLISDMGKNVSATDIEYLAKVTFEESAKAFMKETIKLGIKSRPKGLWGYYLYPDCHNYNVYAPNYSGSCPEDEVLRNNELSWLWNSSAALYPSIGVWKSLGDSENILRFSKFRVHESMRISTMTSHDYALPVFVYTRLGYRDEPLFFLSKQDLVSTIGESAALGAAGIVIWGDMNLTASKANCTKVKQFVSSDLGSYIANVTRAAEVCSLHLCRNNGRCIRKMWNAPSYLHLNPASYHIEASEDGEFTVKGKASDTDLAVMADTFSCHCYQGYEGADCREIKTADGCSGVSPSPGSLMTLCLLLLASYRSIQL

SEQ ID NO: 40 - protein, 467 aa, Homo sapiens
  PH20 precursor 1-467
MGVLKFKHIFFRSFVKSSGVSQIVFTFLLIPCCLTLNFRAPPVIPNVPFLWAWNAPSEFCLGKFDEPLDMSLFSFIGSPRINATGQGVTIFYVDRLGYYPYIDSITGVTVNGGIPQKISLQDHLDKAKKDITFYMPVDNLGMAVIDWEEWRPTWARNWKPKDVYKNRSIELVQQQNVQLSLTEATEKAKQEFEKAGKDFLVETIKLGKLLRPNHLWGYYLFPDCYNHHYKKPGYNGSCFNVEIKRNDDLSWLWNESTALYPSIYLNTQQSPVAATLYVRNRVREAIRVSKIPDAKSPLPVFAYTRIVFTDQVLKFLSQDELVYTFGETVALGASGIVIWGTLSIMRSMKSCLLLDNYMETILNPYIINVTLAAKMCSQVLCQEQGVCIRKNWNSSDYLHLNPDNFAIQLEKGGKFTVRGKPTLEDLEQFSEKFYCSCYSTLSCKEKADVKDTDAVDVCIADGVCIDA

SEQ ID NO: 41 - protein, 477 aa, Homo sapiens
  PH20 precursor 1-477
MGVLKFKHIFFRSFVKSSGVSQIVFTFLLIPCCLTLNFRAPPVIPNVPFLWAWNAPSEFCLGKFDEPLDMSLFSFIGSPRINATGQGVTIFYVDRLGYYPYIDSITGVTVNGGIPQKISLQDHLDKAKKDITFYMPVDNLGMAVIDWEEWRPTWARNWKPKDVYKNRSIELVQQQNVQLSLTEATEKAKQEFEKAGKDFLVETIKLGKLLRPNHLWGYYLFPDCYNHHYKKPGYNGSCFNVEIKRNDDLSWLWNESTALYPSIYLNTQQSPVAATLYVRNRVREAIRVSKIPDAKSPLPVFAYTRIVFTDQVLKFLSQDELVYTFGETVALGASGIVIWGTLSIMRSMKSCLLLDNYMETILNPYIINVTLAAKMCSQVLCQEQGVCIRKNWNSSDYLHLNPDNFAIQLEKGGKFTVRGKPTLEDLEQFSEKFYCSCYSTLSCKEKADVKDTDAVDVCIADGVCIDAFLKPPMETEE

SEQ ID NO: 42 - protein, 478 aa, Homo sapiens
  PH20 precursor 1-478
MGVLKFKHIFFRSFVKSSGVSQIVFTFLLIPCCLTLNFRAPPVIPNVPFLWAWNAPSEFCLGKFDEPLDMSLFSFIGSPRINATGQGVTIFYVDRLGYYPYIDSITGVTVNGGIPQKISLQDHLDKAKKDITFYMPVDNLGMAVIDWEEWRPTWARNWKPKDVYKNRSIELVQQQNVQLSLTEATEKAKQEFEKAGKDFLVETIKLGKLLRPNHLWGYYLFPDCYNHHYKKPGYNGSCFNVEIKRNDDLSWLWNESTALYPSIYLNTQQSPVAATLYVRNRVREAIRVSKIPDAKSPLPVFAYTRIVFTDQVLKFLSQDELVYTFGETVALGASGIVIWGTLSIMRSMKSCLLLDNYMETILNPYIINVTLAAKMCSQVLCQEQGVCIRKNWNSSDYLHLNPDNFAIQLEKGGKFTVRGKPTLEDLEQFSEKFYCSCYSTLSCKEKADVKDTDAVDVCIADGVCIDAFLKPPMETEEP

SEQ ID NO: 43 - protein, 479 aa, Homo sapiens
  PH20 precursor 1-479
MGVLKFKHIFFRSFVKSSGVSQIVFTFLLIPCCLTLNFRAPPVIPNVPFLWAWNAPSEFCLGKFDEPLDMSLFSFIGSPRINATGQGVTIFYVDRLGYYPYIDSITGVTVNGGIPQKISLQDHLDKAKKDITFYMPVDNLGMAVIDWEEWRPTWARNWKPKDVYKNRSIELVQQQNVQLSLTEATEKAKQEFEKAGKDFLVETIKLGKLLRPNHLWGYYLFPDCYNHHYKKPGYNGSCFNVEIKRNDDLSWLWNESTALYPSIYLNTQQSPVAATLYVRNRVREAIRVSKIPDAKSPLPVFAYTRIVFTDQVLKFLSQDELVYTFGETVALGASGIVIWGTLSIMRSMKSCLLLDNYMETILNPYIINVTLAAKMCSQVLCQEQGVCIRKNWNSSDYLHLNPDNFAIQLEKGGKFTVRGKPTLEDLEQFSEKFYCSCYSTLSCKEKADVKDTDAVDVCIADGVCIDAFLKPPMETEEPQ

SEQ ID NO: 44 - protein, 480 aa, Homo sapiens
  PH20 precursor 1-480
MGVLKFKHIFFRSFVKSSGVSQIVFTFLLIPCCLTLNFRAPPVIPNVPFLWAWNAPSEFCLGKFDEPLDMSLFSFIGSPRINATGQGVTIFYVDRLGYYPYIDSITGVTVNGGIPQKISLQDHLDKAKKDITFYMPVDNLGMAVIDWEEWRPTWARNWKPKDVYKNRSIELVQQQNVQLSLTEATEKAKQEFEKAGKDFLVETIKLGKLLRPNHLWGYYLFPDCYNHHYKKPGYNGSCFNVEIKRNDDLSWLWNESTALYPSIYLNTQQSPVAATLYVRNRVREAIRVSKIPDAKSPLPVFAYTRIVFTDQVLKFLSQDELVYTFGETVALGASGIVIWGTLSIMRSMKSCLLLDNYMETILNPYIINVTLAAKMCSQVLCQEQGVCIRKNWNSSDYLHLNPDNFAIQLEKGGKFTVRGKPTLEDLEQFSEKFYCSCYSTLSCKEKADVKDTDAVDVCIADGVCIDAFLKPPMETEEPQI

SEQ ID NO: 45 - protein, 481 aa, Homo sapiens
  PH20 precursor 1-481
MGVLKFKHIFFRSFVKSSGVSQIVFTFLLIPCCLTLNFRAPPVIPNVPFLWAWNAPSEFCLGKFDEPLDMSLFSFIGSPRINATGQGVTIFYVDRLGYYPYIDSITGVTVNGGIPQKISLQDHLDKAKKDITFYMPVDNLGMAVIDWEEWRPTWARNWKPKDVYKNRSIELVQQQNVQLSLTEATEKAKQEFEKAGKDFLVETIKLGKLLRPNHLWGYYLFPDCYNHHYKKPGYNGSCFNVEIKRNDDLSWLWNESTALYPSIYLNTQQSPVAATLYVRNRVREAIRVSKIPDAKSPLPVFAYTRIVFTDQVLKFLSQDELVYTFGETVALGASGIVIWGTLSIMRSMKSCLLLDNYMETILNPYIINVTLAAKMCSQVLCQEQGVCIRKNWNSSDYLHLNPDNFAIQLEKGGKFTVRGKPTLEDLEQFSEKFYCSCYSTLSCKEKADVKDTDAVDVCIADGVCIDAFLKPPMETEEPQIF

SEQ ID NO: 46 - protein, 483 aa, Homo sapiens
  PH20 precursor 1-483
MGVLKFKHIFFRSFVKSSGVSQIVFTFLLIPCCLTLNFRAPPVIPNVPFLWAWNAPSEFCLGKFDEPLDMSLFSFIGSPRINATGQGVTIFYVDRLGYYPYIDSITGVTVNGGIPQKISLQDHLDKAKKDITFYMPVDNLGMAVIDWEEWRPTWARNWKPKDVYKNRSIELVQQQNVQLSLTEATEKAKQEFEKAGKDFLVETIKLGKLLRPNHLWGYYLFPDCYNHHYKKPGYNGSCFNVEIKRNDDLSWLWNESTALYPSIYLNTQQSPVAATLYVRNRVREAIRVSKIPDAKSPLPVFAYTRIVFTDQVLKFLSQDELVYTFGETVALGASGIVIWGTLSIMRSMKSCLLLDNYMETILNPYIINVTLAAKMCSQVLCQEQGVCIRKNWNSSDYLHLNPDNFAIQLEKGGKFTVRGKPTLEDLEQFSEKFYCSCYSTLSCKEKADVKDTDAVDVCIADGVCIDAFLKPPMETEEPQIFYN

SEQ ID NO: 47 - protein, 432 aa, Homo sapiens
  PH20 mature 36-467
LNFRAPPVIPNVPFLWAWNAPSEFCLGKFDEPLDMSLFSFIGSPRINATGQGVTIFYVDRLGYYPYIDSITGVTVNGGIPQKISLQDHLDKAKKDITFYMPVDNLGMAVIDWEEWRPTWARNWKPKDVYKNRSIELVQQQNVQLSLTEATEKAKQEFEKAGKDFLVETIKLGKLLRPNHLWGYYLFPDCYNHHYKKPGYNGSCFNVEIKRNDDLSWLWNESTALYPSIYLNTQQSPVAATLYVRNRVREAIRVSKIPDAKSPLPVFAYTRIVFTDQVLKFLSQDELVYTFGETVALGASGIVIWGTLSIMRSMKSCLLLDNYMETILNPYIINVTLAAKMCSQVLCQEQGVCIRKNWNSSDYLHLNPDNFAIQLEKGGKFTVRGKPTLEDLEQFSEKFYCSCYSTLSCKEKADVKDTDAVDVCIADGVCIDA

SEQ ID NO: 48 - protein, 448 aa, Homo sapiens
  PH20 mature 36-483
LNFRAPPVIPNVPFLWAWNAPSEFCLGKFDEPLDMSLFSFIGSPRINATGQGVTIFYVDRLGYYPYIDSITGVTVNGGIPQKISLQDHLDKAKKDITFYMPVDNLGMAVIDWEEWRPTWARNWKPKDVYKNRSIELVQQQNVQLSLTEATEKAKQEFEKAGKDFLVETIKLGKLLRPNHLWGYYLFPDCYNHHYKKPGYNGSCFNVEIKRNDDLSWLWNESTALYPSIYLNTQQSPVAATLYVRNRVREAIRVSKIPDAKSPLPVFAYTRIVFTDQVLKFLSQDELVYTFGETVALGASGIVIWGTLSIMRSMKSCLLLDNYMETILNPYIINVTLAAKMCSQVLCQEQGVCIRKNWNSSDYLHLNPDNFAIQLEKGGKFTVRGKPTLEDLEQFSEKFYCSCYSTLSCKEKADVKDTDAVDVCIADGVCIDAFLKPPMETEEPQIFYN

SEQ ID NO: 49 - DNA, 1446 bp, Homo sapiens
  DNA encoding soluble rHuPH20 "precursor"
atgggagtgctaaaattcaagcacatctttttcagaagctttgttaaatcaagtggagtatcccagatagttttcaccttccttctgattccatgttgcttgactctgaatttcagagcacctcctgttattccaaatgtgcctttcctctgggcctggaatgccccaagtgaattttgtcttggaaaatttgatgagccactagatatgagcctcttctctttcataggaagcccccgaataaacgccaccgggcaaggtgttacaatattttatgttgatagacttggctactatccttacatagattcaatcacaggagtaactgtgaatggaggaatcccccagaagatttccttacaagaccatctggacaaagctaagaaagacattacattttatatgccagtagacaatttgggaatggctgttattgactgggaagaatggagacccacttgggcaagaaactggaaacctaaagatgtttacaagaataggtctattgaattggttcagcaacaaaatgtacaacttagtctcacagaggccactgagaaagcaaaacaagaatttgaaaaggcagggaaggatttcctggtagagactataaaattgggaaaattacttcggccaaatcacttgtggggttattatctttttccggattgttacaaccatcactataagaaacccggttacaatggaagttgcttcaatgtagaaataaaaagaaatgatgatctcagctggttgtggaatgaaagcactgctctttacccatccatttatttgaacactcagcagtctcctgtagctgctacactctatgtgcgcaatcgagttcgggaagccatcagagtttccaaaatacctgatgcaaaaagtccacttccggtttttgcatatacccgcatagtttttactgatcaagttttgaaattcctttctcaagatgaacttgtgtatacatttggcgaaactgttgctctgggtgcttctggaattgtaatatggggaaccctcagtataatgcgaagtatgaaatcttgcttgctcctagacaattacatggagactatactgaatccttacataatcaacgtcacactagcagccaaaatgtgtagccaagtgctttgccaggagcaaggagtgtgtataaggaaaaactggaattcaagtgactatcttcacctcaacccagataattttgctattcaacttgagaaaggtggaaagttcacagtacgtggaaaaccgacacttgaagacctggagcaattttctgaaaaattttattgcagctgttatagcaccttgagttgtaaggagaaagctgatgtaaaagacactgatgctgttgatgtgtgtattgctgatggtgtctgtatagatgcttttctaaaacctcccatggagacagaagaacctcaaattttctac

SEQ ID NO: 50 - protein, 509 aa, Homo sapiens
  PH20 variant P48A
MGVLKFKHIFFRSFVKSSGVSQIVFTFLLIPCCLTLNFRAPPVIPNVAFLWAWNAPSEFCLGKFDEPLDMSLFSFIGSPRINATGQGVTIFYVDRLGYYPYIDSITGVTVNGGIPQKISLQDHLDKAKKDITFYMPVDNLGMAVIDWEEWRPTWARNWKPKDVYKNRSIELVQQQNVQLSLTEATEKAKQEFEKAGKDFLVETIKLGKLLRPNHLWGYYLFPDCYNHHYKKPGYNGSCFNVEIKRNDDLSWLWNESTALYPSIYLNTQQSPVAATLYVRNRVREAIRVSKIPDAKSPLPVFAYTRIVFTDQVLKFLSQDELVYTFGETVALGASGIVIWGTLSIMRSMKSCLLLDNYMETILNPYIINVTLAAKMCSQVLCQEQGVCIRKNWNSSDYLHLNPDNFAIQLEKGGKFTVRGKPTLEDLEQFSEKFYCSCYSTLSCKEKADVKDTDAVDVCIADGVCIDAFLKPPMETEEPQIFYNASPSTLSATMFIVSILFLIISSVASL

SEQ ID NO: 51 - protein, 509 aa, Homo sapiens
  precursor PH20 variant L499W
MGVLKFKHIFFRSFVKSSGVSQIVFTFLLIPCCLTLNFRAPPVIPNVPFLWAWNAPSEFCLGKFDEPLDMSLFSFIGSPRINATGQGVTIFYVDRLGYYPYIDSITGVTVNGGIPQKISLQDHLDKAKKDITFYMPVDNLGMAVIDWEEWRPTWARNWKPKDVYKNRSIELVQQQNVQLSLTEATEKAKQEFEKAGKDFLVETIKLGKLLRPNHLWGYYLFPDCYNHHYKKPGYNGSCFNVEIKRNDDLSWLWNESTALYPSIYLNTQQSPVAATLYVRNRVREAIRVSKIPDAKSPLPVFAYTRIVFTDQVLKFLSQDELVYTFGETVALGASGIVIWGTLSIMRSMKSCLLLDNYMETILNPYIINVTLAAKMCSQVLCQEQGVCIRKNWNSSDYLHLNPDNFAIQLEKGGKFTVRGKPTLEDLEQFSEKFYCSCYSTLSCKEKADVKDTDAVDVCIADGVCIDAFLKPPMETEEPQIFYNASPSTLSATMFIVSIWFLIISSVASL

SEQ ID NO: 52 - DNA, 6630 bp, Artificial Sequence
  HZ24 vector
tcaatattggccattagccatattattcattggttatatagcataaatcaatattggctattggccattgcatacgttgtatctatatcataatatgtacatttatattggctcatgtccaatatgaccgccatgttggcattgattattgactagttattaatagtaatcaattacggggtcattagttcatagcccatatatggagttccgcgttacataacttacggtaaatggcccgcctggctgaccgcccaacgacccccgcccattgacgtcaataatgacgtatgttcccatagtaacgccaatagggactttccattgacgtcaatgggtggagtatttacggtaaactgcccacttggcagtacatcaagtgtatcatatgccaagtccgccccctattgacgtcaatgacggtaaatggcccgcctggcattatgcccagtacatgaccttacgggactttcctacttggcagtacatctacgtattagtcatcgctattaccatggtgatgcggttttggcagtacaccaatgggcgtggatagcggtttgactcacggggatttccaagtctccaccccattgacgtcaatgggagtttgttttggcaccaaaatcaacgggactttccaaaatgtcgtaataaccccgccccgttgacgcaaatgggcggtaggcgtgtacggtgggaggtctatataagcagagctcgtttagtgaaccgtcagatcactagaagctttattgcggtagtttatcacagttaaattgctaacgcagtcagtgcttctgacacaacagtctcgaacttaagctgcagaagttggtcgtgaggcactgggcaggtaagtatcaaggttacaagacaggtttaaggagaccaatagaaactgggcttgtcgagacagagaagactcttgcgtttctgataggcacctattggtcttactgacatccactttgcctttctctccacaggtgtccactcccagttcaattacagctcttaaggctagagtacttaatacgactcactataggctagcatgggagtgctaaaattcaagcacatctttttcagaagctttgttaaatcaagtggagtatcccagatagttttcaccttccttctgattccatgttgcttgactctgaatttcagagcacctcctgttattccaaatgtgcctttcctctgggcctggaatgccccaagtgaattttgtcttggaaaatttgatgagccactagatatgagcctcttctctttcataggaagcccccgaataaacgccaccgggcaaggtgttacaatattttatgttgatagacttggctactatccttacatagattcaatcacaggagtaactgtgaatggaggaatcccccagaagatttccttacaagaccatctggacaaagctaagaaagacattacattttatatgccagtagacaatttgggaatggctgttattgactgggaagaatggagacccacttgggcaagaaactggaaacctaaagatgtttacaagaataggtctattgaattggttcagcaacaaaatgtacaacttagtctcacagaggccactgagaaagcaaaacaagaatttgaaaaggcagggaaggatttcctggtagagactataaaattgggaaaattacttcggccaaatcacttgtggggttattatctttttccggattgttacaaccatcactataagaaacccggttacaatggaagttgcttcaatgtagaaataaaaagaaatgatgatctcagctggttgtggaatgaaagcactgctctttacccatccatttatttgaacactcagcagtctcctgtagctgctacactctatgtgcgcaatcgagttcgggaagccatcagagtttccaaaatacctgatgcaaaaagtccacttccggtttttgcatatacccgcatagtttttactgatcaagttttgaaattcctttctcaagatgaacttgtgtatacatttggcgaaactgttgctctgggtgcttctggaattgtaatatggggaaccctcagtataatgcgaagtatgaaatcttgcttgctcctagacaattacatggagactatactgaatccttacataatcaacgtcacactagcagccaaaatgtgtagccaagtgctttgccaggagcaaggagtgtgtataaggaaaaactggaattcaagtgactatcttcacctcaacccagataattttgctattcaacttgagaaaggtggaaagttcacagtacgtggaaaaccgacacttgaagacctggagcaattttctgaaaaattttattgcagctgttatagcaccttgagttgtaaggagaaagctgatgtaaaagacactgatgctgttgatgtgtgtattgctgatggtgtctgtatagatgcttttctaaaacctcccatggagacagaagaacctcaaattttctactgaggatccatagctaacgcccctctccctcccccccccctaacgttactggccgaagccgcttggaataaggccggtgtgcgtttgtctatatgttattttccaccatattgccgtcttttggcaatgtgagggcccggaaacctggccctgtcttcttgacgagcattcctaggggtctttcccctctcgccaaaggaatgcaaggtctgttgaatgtcgtgaaggaagcagttcctctggaagcttcttgaagacaaacaacgtctgtagcgaccctttgcaggcagcggaaccccccacctggcgacaggtgcctctgcggccaaaagccacgtgtataagatacacctgcaaaggcggcacaaccccagtgccacgttgtgagttggatagttgtggaaagagtcaaatggctctcctcaagcgtattcaacaaggggctgaaggatgcccagaaggtaccccattgtatgggatctgatctggggcctcggtgcacatgctttacatgtgtttagtcgaggttaaaaaaacgtctaggccccccgaaccacggggacgtggttttcctttgaaaaacacgatgataagcttgccacaacccacagcggccgctgccatcatggttcgaccattgaactgcatcgtcgccgtgtcccaaaatatggggattggcaagaacggagacctaccctggcctccgctcaggaacgagttcaagtacttccaaagaatgaccacaacctcttcagtggaaggtaaacagaatctggtgattatgggtaggaaaacctggttctccattcctgagaagaatcgacctttaaaggacagaattaatatagttctcagtagagaactcaaagaaccaccacgaggagctcattttcttgccaaaagtttggatgatgccttaagacttattgaacaaccggaattggcaagtaaagtagacatggtttggatagtcggaggcagttctgtttaccaggaagccatgaatcaaccaggccacctcagactctttgtgacaaggatcatgcaggaatttgaaagtgacacgtttttcccagaaattgatttggggaaatataaacttctcccagaatacccaggcgtcctctctgaggtccaggaggaaaaaggcatcaagtataagtttgaagtctacgagaagaaagactaaacgcgtggtacctctagagtcgacccgggcggccgcttcgagcagacatgataagatacattgatgagtttggacaaaccacaactagaatgcagtgaaaaaaatgctttatttgtgaaatttgtgatgctattgctttatttgtaaccattataagctgcaataaacaagttaacaacaacaattgcattcattttatgtttcaggttcagggggagatgtgggaggttttttaaagcaagtaaaacctctacaaatgtggtaaaatcgataaggatccgggctggcgtaatagcgaagaggcccgcaccgatcgcccttcccaacagttgcgcagcctgaatggcgaatggacgcgccctgtagcggcgcattaagcgcggcgggtgtggtggttacgcgcagcgtgaccgctacacttgccagcgccctagcgcccgctcctttcgctttcttcccttcctttctcgccacgttcgccggctttccccgtcaagctctaaatcgggggctccctttagggttccgatttagtgctttacggcacctcgaccccaaaaaacttgattagggtgatggttcacgtagtgggccatcgccctgatagacggtttttcgccctttgacgttggagtccacgttctttaatagtggactcttgttccaaactggaacaacactcaaccctatctcggtctattcttttgatttataagggattttgccgatttcggcctattggttaaaaaatgagctgatttaacaaaaatttaacgcgaattttaacaaaatattaacgcttacaatttcctgatgcggtattttctccttacgcatctgtgcggtatttcacaccgcatatggtgcactctcagtacaatctgctctgatgccgcatagttaagccagccccgacacccgccaacacccgctgacgcgccctgacgggcttgtctgctcccggcatccgcttacagacaagctgtgaccgtctccgggagctgcatgtgtcagaggttttcaccgtcatcaccgaaacgcgcgagacgaaagggcctcgtgatacgcctatttttataggttaatgtcatgataataatggtttcttagacgtcaggtggcacttttcggggaaatgtgcgcggaacccctatttgtttatttttctaaatacattcaaatatgtatccgctcatgagacaataaccctgataaatgcttcaataatattgaaaaaggaagagtatgagtattcaacatttccgtgtcgcccttattcccttttttgcggcattttgccttcctgtttttgctcacccagaaacgctggtgaaagtaaaagatgctgaagatcagttgggtgcacgagtgggttacatcgaactggatctcaacagcggtaagatccttgagagttttcgccccgaagaacgttttccaatgatgagcacttttaaagttctgctatgtggcgcggtattatcccgtattgacgccgggcaagagcaactcggtcgccgcatacactattctcagaatgacttggttgagtactcaccagtcacagaaaagcatcttacggatggcatgacagtaagagaattatgcagtgctgccataaccatgagtgataacactgcggccaacttacttctgacaacgatcggaggaccgaaggagctaaccgcttttttgcacaacatgggggatcatgtaactcgccttgatcgttgggaaccggagctgaatgaagccataccaaacgacgagcgtgacaccacgatgcctgtagcaatggcaacaacgttgcgcaaactattaactggcgaactacttactctagcttcccggcaacaattaatagactggatggaggcggataaagttgcaggaccacttctgcgctcggcccttccggctggctggtttattgctgataaatctggagccggtgagcgtgggtctcgcggtatcattgcagcactggggccagatggtaagccctcccgtatcgtagttatctacacgacggggagtcaggcaactatggatgaacgaaatagacagatcgctgagataggtgcctcactgattaagcattggtaactgtcagaccaagtttactcatatatactttagattgatttaaaacttcatttttaatttaaaaggatctaggtgaagatcctttttgataatctcatgaccaaaatcccttaacgtgagttttcgttccactgagcgtcagaccccgtagaaaagatcaaaggatcttcttgagatcctttttttctgcgcgtaatctgctgcttgcaaacaaaaaaaccaccgctaccagcggtggtttgtttgccggatcaagagctaccaactctttttccgaaggtaactggcttcagcagagcgcagataccaaatactgttcttctagtgtagccgtagttaggccaccacttcaagaactctgtagcaccgcctacatacctcgctctgctaatcctgttaccagtggctgctgccagtggcgataagtcgtgtcttaccgggttggactcaagacgatagttaccggataaggcgcagcggtcgggctgaacggggggttcgtgcacacagcccagcttggagcgaacgacctacaccgaactgagatacctacagcgtgagctatgagaaagcgccacgcttcccgaagggagaaaggcggacaggtatccggtaagcggcagggtcggaacaggagagcgcacgagggagcttccagggggaaacgcctggtatctttatagtcctgtcgggtttcgccacctctgacttgagcgtcgatttttgtgatgctcgtcaggggggcggagcctatggaaaaacgccagcaacgcggcctttttacggttcctggccttttgctggccttttgctcacatggctcgacagatct

SEQ ID NO: 53 - protein, 186 aa, Mus musculus
  dihydrofolate reductase
VRPLNCIVAVSQNMGIGKNGDLPWPPLRNEFKYFQRMTTTSSVEGKQNLVIMGRKTWFSIPEKNRPLKDRINIVLSRELKEPPRGAHFLAKSLDDALRLIEQPELASKVDMVWIVGGSSVYQEAMNQPGHLRLFVTRIMQEFESDTFFPEIDLGKYKLLPEYPGVLSEVQEEKGIKYKFEVYEKKD

SEQ ID NO: 54 - protein, 6 aa, Artificial Sequence
  His tag
HHHHHH

SEQ ID NO: 55 - protein, 8 aa, Artificial Sequence
  Flag tag
DYKDDDDK

SEQ ID NO: 56 - DNA, 1449 bp, Homo sapiens
  Gen2 mRNA sequence
atgggagtgctaaaattcaagcacatctttttcagaagctttgttaaatcaagtggagtatcccagatagttttcaccttccttctgattccatgttgcttgactctgaatttcagagcacctcctgttattccaaatgtgcctttcctctgggcctggaatgccccaagtgaattttgtcttggaaaatttgatgagccactagatatgagcctcttctctttcataggaagcccccgaataaacgccaccgggcaaggtgttacaatattttatgttgatagacttggctactatccttacatagattcaatcacaggagtaactgtgaatggaggaatcccccagaagatttccttacaagaccatctggacaaagctaagaaagacattacattttatatgccagtagacaatttgggaatggctgttattgactgggaagaatggagacccacttgggcaagaaactggaaacctaaagatgtttacaagaataggtctattgaattggttcagcaacaaaatgtacaacttagtctcacagaggccactgagaaagcaaaacaagaatttgaaaaggcagggaaggatttcctggtagagactataaaattgggaaaattacttcggccaaatcacttgtggggttattatctttttccggattgttacaaccatcactataagaaacccggttacaatggaagttgcttcaatgtagaaataaaaagaaatgatgatctcagctggttgtggaatgaaagcactgctctttacccatccatttatttgaacactcagcagtctcctgtagctgctacactctatgtgcgcaatcgagttcgggaagccatcagagtttccaaaatacctgatgcaaaaagtccacttccggtttttgcatatacccgcatagtttttactgatcaagttttgaaattcctttctcaagatgaacttgtgtatacatttggcgaaactgttgctctgggtgcttctggaattgtaatatggggaaccctcagtataatgcgaagtatgaaatcttgcttgctcctagacaattacatggagactatactgaatccttacataatcaacgtcacactagcagccaaaatgtgtagtcaagtgctttgccaggagcaaggagtgtgtataaggaaaaactggaattcaagtgactatcttcacctcaacccagataattttgctattcaacttgagaaaggtggaaagttcacagtacgtggaaaaccgacacttgaagacctggagcaattttctgaaaaattttattgcagctgttatagcaccttgagttgtaaggagaaagctgatgtaaaagacactgatgctgttgatgtgtgtattgctgatggtgtctgtatagatgcttttctaaaacctcccatggagacagaagaacctcaaattttctactga

SEQ ID NO: 57 - protein, 17 aa, Homo sapiens
  C-terminal peptide cleaved from soluble rHuPH20 aa 431-447
DAFKLPPMETEEPQIFY

SEQ ID NO: 58 - protein, 16 aa, Homo sapiens
  C-terminal peptide cleaved from soluble rHuPH20 aa 431-446
DAFKLPPMETEEPQIF

SEQ ID NO: 59 - protein, 15 aa, Homo sapiens
  C-terminal peptide cleaved from soluble rHuPH20 aa 431-445
DAFKLPPMETEEPQI

SEQ ID NO: 60 - protein, 14 aa, Homo sapiens
  C-terminal peptide cleaved from soluble rHuPH20 aa 431-444
DAFKLPPMETEEPQ

SEQ ID NO: 61 - protein, 13 aa, Homo sapiens
  C-terminal peptide cleaved from soluble rHuPH20 aa 431-443
DAFKLPPMETEEP

SEQ ID NO: 62 - protein, 12 aa, Homo sapiens
  C-terminal peptide cleaved from soluble rHuPH20 aa 431-442
DAFKLPPMETEE

SEQ ID NO: 63 - protein, 520 aa, Ovis aries
  PH20
LDFPAPPLISNTSFLWAWNAPAERCVKIFKLPPDLRLFSVKGSPQKSATGQFITLFYADRLGYYPHIDEKTGNTVYGGIPQLGNLKNHLEKAKKDIAYYIPNDSVGLAVIDWENWRPTWARNWKPKDVYRDESVELVLQKNPQLSFPEASKIAKVDFETAGKSFMQETLKLGKLLRPNHLWGYYLFPDCYNHNYNQPTYNGNCSDLEKRRNDDLDWLWKESTALFPSVYLNIKLKSTPKAAFYVRNRVQEAIRLSKIASVESPLPVFVYHRPVFTDGSSTYLSQGDLVNSVGEIVALGASGIIMWGSLNLSLTMQSCMNLGNYNTTLNPYIINVTLAAKMCSQVLCHDEGVCTRKQWNSSDYLHLNPIMNFAIQTGKGGKYTVPGKVTLEDLQTFSDKFYCSCYANINCKKRVDIKNVHSVNVCMAEDICIEGPVKLQPSDHSSSQNEASTTTVSSISPSTTATTVVSPCTPEKQSPECLKVRCLEAIANVTQTGCQGVKWKNTSSQSQSSIQNIKNQTT

SEQ ID NO: 64 - protein, 474 aa, Bos taurus
  precursor cow PH20
MGMFRRHHISFRSFAGSSGTPQAVFTFLLLPCCLALDFRAPPLISNTSFLWAWNAPVERCVNRRFQLPPDLRLFSVKGSPQKSATGQFITLFYADRLGYYPHIDEKTGKTVFGGIPQLGNLKSHLEKAKNDIAYYIPNDSVGLAVIDWENWRPTWARNWKPKDVYRDESVELVLQKNPQLSFPEASKIAKVDFETAGKSFMQETLKLGKLLRPNHLWGYYLFPDCYNHNHNQPTYNGNCPDVEKRRNDDLEWLWKESTALFPSVYLNIRLKSTQNAALYVRNRVQEAIRLSKIASVESPLPVFVYARPVFTDGSSTYLSQGDLVNSVGEIVSLGASGIIMWGSLNLSLSVQSCMNLGTYLNTTLNPYIINVTLAAKMCSQVLCHDGGVCTRKHWNSSDYLHLNPMNFAIQTGEGGKYTVPGTLTLEDLQKFSDTFYCSCYSNLSCKKRVDIKNVHSVDVCMAEDVCIDAFLKPP

SEQ ID NO: 65 - protein, 517 aa, Ovis aries
  PH20
DFRAPPLISNTSFLWAWNAPAERCIKIFKLPPDLRLFSVKGSPQKSATGQFITLFYADRLGYYPHIDEKTGNTVYGGIPQLGNLKNHLEKAKKDIAYYIPNDSVGLAVIDWENWRPTWARNWKPKDVYRDESVELVLQKNPQLSFPEASKIAKVDFETAGKSFMQETLKLGKLLRPNHLWGYYLFPDCYNHNYNQPTYNGNCSDLEKRRNDDLDWLWKESTALFPSVYLNIKLKSTPKAAFYVRNRVQEAIRLSKIASVESPLPVFVYHRPVFTDGSSTYLSQGDLVNSVGEIVALGASGIIMWGSLNLSLTMQSCMNLGNYLNTTLNPYIINVTLAAKMCSQVLCHDEGVCTRKQWNSSDYLHLNPMNFAIQTGKGGKYTVPGKVTLEDLQTFSDKFYCSCYANINCKKRVDIKNVHSVNVCMAEDICIEGPVKLQPSDHSSSQNEASTTTVSSISPSTTATTVSPCTPEKQSPECLKVRCLEAIANVTQTGCQGVKWKNTSSQSSIQNIKNQTTY

SEQ ID NO: 66 - DNA, 1620 bp, Ovis aries
  encoding sheep PH20
ttttccgtgttggttggctctggacttcagagcaccccctctcatttcaaacacttctttcctctgggcctggaatgccccagctgaacgttgtattaaaatctttaaactacctccagatctgagactcttctctgtaaaaggaagcccccaaaaaagtgctacgggacaatttattacattattttatgctgatagacttggctactatcctcatatagatgaaaaaacaggcaacactgtatatggaggaattccccagttgggaaacttaaaaaatcatttggaaaaagccaaaaaagacattgcctattacataccaaatgacagcgtgggcttggcggtcattgactgggaaaactggaggcctacctgggcaagaaactggaaacctaaagatgtttacagggatgagtctgttgagttggttctgcaaaaaaatccacaactcagtttcccagaggcttccaagattgcaaaagtggattttgagacagcaggaaagagtttcatgcaagagactttaaaactgggaaaattacttcggccaaatcacttatggggttattatctttttcctgattgttacaatcataattataaccagcctacttacaatggaaattgctctgatttagaaaaaaggagaaatgatgatctcgactggttgtggaaggaaagcactgcccttttcccttctgtttatttgaatatcaagttaaaatctactccaaaagctgccttctatgttcgtaatcgtgtccaggaagccattcggttgtctaaaatagcgagtgttgaaagtccacttcccgtttttgtatatcaccgtccagtttttactgatgggtcttcaacatacctttctcagggtgaccttgtgaattcggttggtgagatcgttgctctaggtgcctctgggattataatgtggggcagtctcaatctaagcctaactatgcaatcttgcatgaacctaggcaattacttgaacactacactgaatccttacataatcaacgtcaccctagcagccaaaatgtgcagccaagtgctttgccacgatgaaggagtgtgtacaaggaaacaatggaattcaagcgactatcttcacctgaacccaatgaattttgctattcaaactgggaaaggtggaaaatacacagtacctgggaaagtcacacttgaagacctgcaaacgttttctgataaattttattgcagttgttatgccaacatcaactgtaagaagagagttgatataaaaaatgttcatagtgttaatgtatgtatggcagaagacatttgtatagagggccctgtgaagttacaacccagtgatcattcctctagccagaatgaggcatctactaccaccgtcagcagtatctcaccctctactacagccaccacagtatctccatgtactcctgagaaacagtcccctgagtgcctcaaagtcaggtgtttggaagccatcgccaacgtcacccaaacggggtgtcaaggtgttaaatggaagaacacttccagtcagtcaagtattcaaaatattaaaaatcaaacaacctattaaaatataaattcagtgcttataaaaaaaaaaaaaaaaaaaaaaaa

SEQ ID NO: 67 - protein, 793 aa, Arthrobacter sp.
  hyaluronan lyase (strain FB24)
MTREFSRRTALKGAALSGLLLAMVHGPAHAAATANATLTPADFAGLRQRWVDQITGRKVLVAGDNDFVTALAALDKKARTAIDLLERSAGRLTVFSDLSLAKDTDLVTTHTRLATMATAWATPGSEHFADAGLLAAIRAGLADANSLCYNASKEEQGNWWSWEIGTPKALADTMVLLHAELTAAERAAYCAAIDHFVPDPWQQFPPKRGKITSVGANRVDLCQAVTIRSLVDEDAEKLTHAVAGLSEVWQYVSAGNGFFTDGSFIQHSTTPYTGSYGVVLLTGLSKLFALLGGTGAEVSDPSRDILFKTVEGSFAPFMVAGAMADSVRGRSISRESNTGFDLGASTIESILLLARAVDPVTARRWRSLCLAWINQNRKAPILADAGVGRTALVKELLAMGLTETDLPGGHYLFPAMDRTMHHSQGWTLSTAMASSRIAWYECGNGENNRGYHTGSGMTYVYDGDLGQYDDAFWATANHCRLPGITVDTSSLPDKVEGEWGAATPANEWTGSTAYGDVAAVGQHLIGPGGTGLTARKSWFVSKDVIVCLGADIRTGSGSRIETVVDHRNLHAGFNAMGTAAGTVAATPGHPEVLTVDRWVHLEGFGGYVVLDAAPLQVLREQREGSWSEVNVKGSAARQTRNYATLYFDHGHEPEAASYAYLVAPGASASMTSSLSGQSFHTVLRNDEVAQAVKFKKEKTTAATFWRPGTVGDLALSGPACVVVKEVGDRLSIAVSDPTQNASTLTLRLKTKRFFRIIEGQGASLSHGADGFTVLEVDIANHAGRTKQIELSAE

SEQ ID NO: 68 - protein, 557 aa, Bdellovibrio bacteriovorus
  hyaluronan lyase
MTKFFFLLTLISATAFAQSEPDWTAGVPVPPGGRSNIYSWNDFDFQATLNKGKIHAQVYPVTVTGMLPPYEPVRRLIEEKNSNPLRKWIQSLMKGLSGFRSFEDVLKNLGLHKYPLENERGVYAVPYPNEIRPDTLMGFGLIERNGAEGFTFSCAACHSSNLFGKTVLGMTNRFPRANEFFIKAKKVMPLMDPHIFQAYTRATDAETALLVESKERLKSVALKQPIALGLDTSLAQVSLSLNRRAKDGYANYSDKAARSPRADAYLDNKPADSKPAVWWNVKYKNRWLSDGSVLSGNPIFTNLIWNEIGRGADLHELEQWLADNDHIIKELTTAVFASEAPHITDFYPAEKIDLGRAKAGEQIFKNTCAKCHGHYEKAWNLPQALVLSAAERLKTVEVRYKEKTPVVNVGTDPFRRQGMKSLEQLNDLEISKKNGIVIKAQEGYVPPPLVGIWARWPYMHNNSIPNLCVLLTPAKKRPSIYYSGEALNKDTDYDFSCGGYPIGDKTPKAWKTREHLYDTRNPGMGNMGHDEGIFIKDGKEILSAEDKYNLIQFLQTL

SEQ ID NO: 69 - protein, 813 aa, Propionibacterium acnes
  hyaluronan lyase
MFGTPSRRTFLTASALSAMALAASPTVTDAIAAPGPDSWSALCERWIDIITGRRAARTSDPRARAIIAKTDRKVAEILTDLVSGSSRQTVLISADLRKEQSPFITKTARAIESMACAWATPGSSYHKDPEILSACIEGLRDFCRLRYNPSQDEYGNWWDWEDGASRAVADVMCILHDVLPPEVMSAAAAGIDHFIPDPWFQQPASVKPTANPVQPVVSTGANRMDLTRAVMCRSIATGDEKRLRHAVDGLPDAWRVTTEGDGFRADGGFIQHSHIPYTGGYGDVLFSGLAMLFPLVSGMRFDIVESARKAFHDQVERGFIPVMYNGQILDDVRGRSISRINESAAMHGISIARAMLMMADALPTHRAEQWRGIVHGWMARNTFDHLSEPSTLVDISLFDAAAKARPVPESSTPSYFASMDRLVHRTADWLITVSNCSDRIAWYEYGNGENEWASRTSQGMRYLLLPGDMGQYEDGYWATVDYSAPTGTTVDSTPLKRAVGASWAAKTPTNEWSGGLASGSWSAAASHITSQDSALKARRLWVGLKDAMVELTTDVTTDASRAITVVEHRKVASSSTKLLVDGNRVSSATSFQNPRWAHLDGVGGYVFATDTDLSADVATRKGTWIDVNPSRKVKGADEVIERAYASLHVTHHDRPVAWALLPTASRSHTMALATRPGVEPFTVLRNDATVQAVRSAGALLTKDPTVVTTLAFWKPATCGGVAVNRPALVQTRESANQMEVVIVEPTQKRGSLTVTIEGSWKVKTADSHVDVSCENAAGTLHVDTAGLGGQSVRVTLARQVTQTPSGGGRHDRA

SEQ ID NO: 70 - protein, 1072 aa, Streptococcus agalactiae
  hyaluronan lyase
MEIKKKYRIMLYSALILGTILVNNSYQAKAEELTKTTSTSQIRDTQTNNIEVLQTESTTVKETSTTTTQQDLSNPTASTATATATHSTMKQVVDNQTQNKELVKNGDFNQTNPVSGSWSHTSAREWSAWIDKENTADKSPIIQRTEQGQVSLSSDKGFRGAVTQKVNIDPTKKYEVKFDIETSNKAGQAFLRIMEKKDNNTRLWLSEMTSGTTNKHTLTKIYNPKLNVSEVTLELYYEKGTGSATFDNISMKAKGPKDSEHPQPVTTQIEESVNTALNKNYVFNKADYQYTLTNPSLGKIVGGILYPNATGSTTVKISDKSGKIIKEVPLSVTASTEDKFTKLLDKWNDVTIGNHVYDTNDSNMQKINQKLDETNAKNIKTIKLDSNHTFLWKDLDNLNNSAQLTATYRRLEDLAKQITNPHSTIYKNEKAIRTVKESLAWLHQNFYNVNKDIEGSANWWDFEIGVPRSITATLALMNNYFTDAEIKTYTDPIEHFVPDAGYFRKTLDNPFKALGGNLVDMGRVKIIEGLLRKDNTIIEKTSHSLKNLFTTATKAEGFYADGSYIDHTNVAYTGAYGNVLIDGLTQLLPIIQETDYKISNQELDMVYKWINQSFLPLIVKGELMDMSRGRSISREAASSHAAAVEVLRGFLRLANMSNEERNLDLKSTIKTIITSNKFYNVFNNLKSYSDIANMNKMLNDSTVATKPLKSNLSTFNSMDRLAYYNAEKDFGFALSLHSKRTLNYEGMNDENTRGWYTGDGMFYLYNSDQSHYSNHFWPTVNPYKMAGTTEKDAKREDTTKEFMSKHSKDAKEKTGQVTGTSDFVGSVKLNDHFALAAMDFTNWDRTLTAQKGWVILNDKIVFLGSNIKNTNGIGNVSTTIDQRKDDSKTPYTTYVNGKTIDLKQASSQQFTDTKSVFLESKEPGRNIGYIFFKNSTIDIERKEQTGTWNSINRTSKNTSIVSNPFITISQKHDNKGDSYGYMMVPNIDRTSFDKLANSKEVELLENSSKQQVIYDKNSQTWAVIKHDNQESLINNQFKMNKAGLYLVQKVGNDYQNVYYQPQTMTKTDQLAI

SEQ ID NO: 71 - protein, 1072 aa, Streptococcus agalactiae 18RS21
  hyaluronan lyase
MEIKKKHRIMLYSALILGTILVNNSYQAKAEELTKTTSTSQIRDTQTNNIEVLQTESTTVKETSTTTTQQDLSNPTASTATATATHSTMKQVVDNQTQNKELVKNGDFNQTNPVSGSWSHTSAREWSAWIDKENTADKSPIIQRTEQGQVSLSSDKGFRGAVTQKVNIDPTKKYEVKFDIETSNKAGQAFLRIMEKKDNNTRLWLSEMTSGTTNKHTLTKIYNPKLNVSEVTLELYYEKGTGSATFDNISMKAKGPKDSEHPQPVTTQIEESVNTALNKNYVFNKADYQYTLTNPSLGKIVGGILYPNATGSTTVKISDKSGKIIKEVPLSVTASTEDKFTKLLDKWNDVTIGNHVYDTNDSNMQKINQKLDETNAKNIKTIKLDSNHTFLWKDLDNLNNSAQLTATYRRLEDLAKQITNPHSTIYKNEKAIRTVKESLAWLHQNFYNVNKDIEGSANWWDFEIGVPRSITATLALMNNYFTDAEIKTYTDPIEHFVPDAGYFRKTLDNPFKALGGNLVDMGRVKIIEGLLRKDNTIIEKTSHSLKNLFTTATKAEGFYADGSYIDHTNVAYTGAYGNVLIDGLTQLLPIIQETDYKISNQELDMVYKWINQSFLPLIVKGELMDMSRGRSISREAASSHAAAVEVLRGFLRLANMSNEERNLDLISTIKTIITSNKFYNVFNNLKSYSDIANMNKMLNDSTVATKPLKSNLSTFNSMDRLAYYNAEKDFGFALSLHSKRTLNYEGMNDENTRGWYTGDGMFYLYNSDQSHYSNHFWPTVNPYKMAGTTEKDAKREDTTKEFMSKHSKDAKEKTGQVTGTSDFVGSVKLNDHFALAAMDFTNWDRTLTAQKGWVILNDKIVFLGSNIKNTNGIGNVSTTIDQRKDDSKTPYTTYVNGKTIDLKQASSQQFTDTKSVFLESKEPGRNIGYIFFKNSTIDIERKEQTGTWNSINRTSKNTSIVSNPFITISQKHDNKGDSYGYMMVPNIDRTSFDKLANSKEVELLENSSKQQVIYDKNSQTWAVIKHDNQESLINNQFKMNKAGLYLVQKVGNDYQNVYYQPQTMTKTDQLAI

SEQ ID NO: 72 - protein, 1081 aa, Streptococcus agalactiae serotype Ia
  hyaluronan lyase
MEIKKKHRIMLYSALILGTILVNNSYQAKAEEFTKTTSTSQIRDTQTNNVEVPQTESTTVKGTSTTTTQQDLSNSTASTATATATHSTMKQVVDNQTQNKELVKNGDFKEKIIDKKIDKKSQWTNLYGAKDWNTYIDQTKSVNKSPIIQRTEQGQVSLSSDKGFRGAVTQKVNIDPTKKYEVKFDIETSNKVGQAFLRIMKKKDKNTRLWLSEMTSGTTNKHTLTKIYNPKLNVSEVTLELYYEKGTGSVTFDNISMKAKGPKDSEHPQPVTTQIEESVNTALNKNYVFNKADYQYTLTNPSLGKIVGGILYPSATGSTTVKISDKSGKIIKEVPLSVTASTEDNFTKLLDKWNDVTIGNHVYDTNDSNMQKLNQKLDETNAKNIKDIKLDSNRTFLWEDLKGLNNSAQLTATYRRLEDLAKQITNPHSTIYKNEKAIRTVKESLAWLHQNFYNVNKDIEGSANWWDFEIGVPRSITATLALMNNYFTDAEIKTYTDPIEHFVPDAGYFRKTLVNPFKALGGNLVDMGRVKIIEGLLRKDNTIIKKTSHSLKNLFTTATKAEGFYADGSYIDHTNVAYTGAYGNVLIDGLTQLLPIIQETDYKISNQELDMVYKWINQSFLPLIVKGELMDMSRGRSISREAASSHAAAVEVLRGFLRLANMSNEERNLDLKSTIKTIITSNKFYNVFNNLKSYSDIANMNKLLNDSTVATKPLKSNLSTFNSMDRLAYYNAEKDFGFALSLHSKRTLNYEGMNDENTRGWYTGDGMFYLYNSDQSHYSNHFWPTVNPYKMAGTTEKDTGREDTIKKLMNRYDKTNKNSKVMTGQVTGTSDFVGSVKLNDHFALAAMDFTNWDRTLTAQKGWVILNDKIVFLGSNIKNTNGVGNVSTTIDQRKDDSKTPYTTYVNGKTVDLKQASSQQFTDTKSVFLESKEPGRNIGYIFFKNSTIDIERKEQTGTWNSINRTSKNTSIVSNPFITISQKHDNKGDSYGYMMVPNIDRTSFDKLANSKEVELLENSSKQQVIYDKNSQTWAVIKHDNQESLINNQFKMNKAGLYLVQKVGNDYQNVYYQPQTMTKTDQLAI

SEQ ID NO: 73 - protein, 984 aa, Streptococcus agalactiae serotype III
  hyaluronan lyase
MKQVVDNQTQNKELVKNGDFNQTNPVSGSWSHTSAREWSAWIDKENTADKSPIIQRTEQGQVSLSSDKGFRGAVTQKVNIDPTKKYEVKFDIETSNKAGQAFLRIMEKKDNNTRLWLSEMTSGTTNKHTLTKIYNPKLNVSEVTLELYYEKGTGSATFDNISMKAKGPKDSEHPQPVTTQIEESVNTALNKNYVFNKADYQYTLTNPSLGKIVGGILYPNATGSTTVKISDKSGKIIKEVPLSVTASTEDKFTKLLDKWNDVTIGNHVYDTNDSNMQKINQKLDETNAKNIKTIKLDSNHTFLWKDLDNLNNSAQLTATYRRLEDLAKQITNPHSTIYKNEKAIRTVKESLAWLHQNFYNVNKDIEGSANWWDFEIGVPRSITATLALMNNYFTDAEIKTYTDPIEHFVPDAGYFRKTLDNPFKALGGNLVDMGRVKIIEGLLRKDNTIIEKTSHSLKNLFTTATKAEGFYADGSYIDHTNVAYTGAYGNVLIDGLTQLLPIIQETDYKISNQELDMVYKWINQSFLPLIVKGELMDMSRGRSISREAASSHAAAVEVLRGFLRLANMSNEERNLDLKSTIKTIITSNKFYNVFNNLKSYSDIANMNKMLNDSTVATKPLKSNLSTFNSMDRLAYYNAEKDFGFALSLHSKRTLNYEGMNDENTRDWYTGDGMFYLYNSDQSHYSNHFWPTVNPYKMAGTTEKDAKREDTTKEFMSKHSKDAKEKTGQVTGTSDFVGSVKLNDHFALAAMDFTNWDRTLTAQKGWVILNDKIVFLGSNIKNTNGIGNVSTTIDQRKDDSKTPYTTYVNGKTIDLKQASSQQFTDTKSVFLESKEPGRNIGYIFFKNSTIDIERKEQTGTWNSINRTSKNTSIVSNPFITISQKHDNKGDSYGYMMVPNIDRTSFDKLANSKEVELLENSSKQQVIYDKNSQTWAVIKHDNQESLINNQFKMNKAGLYLVQKVGNDYQNVYYQPQTMTKTDQLAI

SEQ ID NO: 74 - protein, 807 aa, Staphylococcus aureus (strain COL); identical to SEQ ID NO: 33
  hyaluronan lyase

SEQ ID NO: 75 - protein, 420 aa, Staphylococcus aureus (strain MRSA252)
  hyaluronan lyase
MTYRMKKWQKLSTITLLMAGVITLNGGEFRSIDKHQIAVADTNVQTTDYEKLRNIWLDVNYGYDKYDENNPDMKKKFEATENEAEKLLKEMKTESDRKYLWESSKDLDTKSADMTRTYRNIEKISEAMKHKNTKLKTDENKTKVKDALEWLHKNAYGKEPDKKVADLTSNFKNKTSRNTNLNWWDYEIGTPRALTNTLILLQEDFTDEEKKKYTAPIKTFAPDSDKILSSVGKSEPAKGGNLVDISKVKLLESIIEEDKDMMKKSIDSFNTVFTYAQNSATGKERNGFYKDGSYIDHQDVPYTGAYGVVLLEGISQMMPMIKETPFNDSNQNDTTLKSWIDDGFMPLIYKGEMMDLSRGRAISRENETSHSASATVMKSLLRLSDTMDKSTKAKYKKIVKTSVESDSSYKQTDYLSSYSD

SEQ ID NO: 76 - protein, 806 aa, Staphylococcus aureus (strain MRSA252)
  hyaluronan lyase
MTNKMKKWQKLSTITLLMTGVIALNNGEFRNVDKHQIAVADTNVQTPDYEKLKKTWLDVNYGYDQYDENNQDMKKKFDAKEKEAKKLLDDMKTDTNRTYLWSGAENLETNSSHMTKTYRNIEKIAESMQHKNTVLKTVENKLKIKEALDWMHKNVYGKNPSQKVEDLTKNRKGQTTPKNNSLNWWDYEIGTPRALTNTLLLMDDMLTKDEMKNYSKPISTYAPSSDKILSSVGESEDAKGGNLVDISKVKLLESVIEEDVDMLKKSIDSFNKVFTYVQDSATGKGRNGFYKDGSYIDHQDVPYTGAYGVVLLEGISQMMPMIKESPFKTTQDNATLSNWIDEGFMPLIYKGEMMDLSRGRAISRENETSHTASATVMKSLLRLNDTMDDSTKTRYKQIVKTSVNSDSSYNQNNYLNSYSDIAKMKKLMNDSTISKNDLTQQLKIYNDMDRVTYHNKDLDFAFGLSMTSKNIARYENINGENLKGWHTGAGMSYLYNSDVKHYRDNFWATADMTCLPGTTTLNDMPSTNTKNDKSFVGGTKLNNKYASIGMDFENQDKTLTAKKSYFILNDKIVFLGTGIKSTDSSKNPVTSVENRKANGYKLFKDDIEITTSDVNAQETHSVFLESNDTKKNIGYHFLDKPKITVKKESHTGKWSEINKSQKKDDKKDEYYEVTQTHNTSDSKYAYVLYPGLSKSDFKSKNNNVSIVKQDEDFHVIKDNDGVFAGVNYSDNTKSFDINGITVELKEKGMFVIKKKDDKAYKCSFYNPETTNTASNIESKIFIKGYTITNKSVINSNDAGVNFELTK

SEQ ID NO: 77 - protein, 815 aa, Staphylococcus aureus (strain MSSA476)
  hyaluronan lyase
MTYRIKKWQKLSTITLLMAGVITLNGGEFRSIDKYQIAVADTNVQTPDYEKLRNTWLDVNYGYDKYDEKNDAMKKKFEATENEAKKLLSEMKTESDRKYLWENSKDLDTKSADMTRTYRNIEKIAEAMKHKDTKLKIDENKKKVKDALEWLHKNAYGKEPDKKVADLTSNFKNKTSRNTNLNWWDYEIGTPRALTNTLILLNDQFSNDEKKKYTAPIKTFAPESDKILSSVGQPEQAKGGNLVDIAKVKLLESIIEEDKDITKNSIDAFNKVFTYVQSNATGKERNGFYKDGSYIDHQDVPYTGAYGVVLLEGISQMMPMIKETPFNDKTQNDTTLKSWIDDGFMPLIYKGEMMDLSRGRAISRENETSHTASATVMKSLLRLSDAMDDSTKAKYKQIVKTSVKSDSSYGQNDTLSSYSDISKMKSLMEDSTISTNGLTQQLKIYNDMDRVTYHNKDLDFAFGLSMTSKNVARYESINGENLKGWHTGAGMSYLYNSDVKHYRDNFWATADMKRLAGTTTLENEEPKGTDVKKSSKTFVGGTKFDDQHASIGMDFENQDKTLTAKKSYFILNDKIVFLGTGIKSTDSSKNPVTTIENRKANGYTLYTDDKQTTASDNQGTNSVFLESTNKPKNNIGYHFLNESKITVKKESHTGKWSDINKSQKQDSKTNQYYEVTQKHSNTDSKYAYVLYPGLSKDDFNTKKDKVTVVKQDDDFHVVKDNESVWAGVNYSDSTQTFIINNTKVEVKAKGMFILKKKDDKTYECSFYNPESTNTASDIESKISMTGYSITNKNTSTSNESGVRFELQQTLNKDDN

SEQ ID NO: 78 - protein, 807 aa, Staphylococcus aureus (strain NCTC 8325); identical to SEQ ID NO: 33
  hyaluronan lyase

SEQ ID NO: 79 - protein, 809 aa, Staphylococcus aureus (strain bovine RF122)
  hyaluronan lyase
MTYRMKKWQKLSTITLLMAGGITFNDSEFRSVDKHQIAVADTNVQTPNYEKLKNTWLDVNYGYDKYDESNPDMKKKFEATEKEARKLLSEMKTESDRKYLWENSKDLDTKSADMTRTYRNIEKIAEAMKHPKTTLKNDENKKKVKDALEWLHKNAYGKEPGKKVADLKTNFSKSAPQKNTNLNWWDYEIGTPRALTNTLILLKEDFTDEEKKKYTAPIKTFAPKSDEILSSVGKAEPAKGGNLVDISKVKLLESIIEEDKDMMKNSIDSFNKVFTYVQDSATDKERNGFYKDGSYIDHKDVPYTGAYGVVLLEGISQMMPMIKETPFNDKTQNNTTLTSWIDDGFMPLIYKGEMMDLSRGRAISRENETSHSASATVMKSLLRLSDAMDESTKAKYKQIVKNSVKSDSSYGQNDTLSSYSDIDKMKSLMTDSTISTNGLTQQLKIYNAMDRVTYHNKDLDFAFGLSMTSKNVARYENINGENLKGWHTGAGMSYLYNSDVRHYRDNFWATADMKRLADTTTLENEEPKGTDVKKSSKTFVGGTKFDDQHASIGMDFENQDKTLTAKKSYFILNDKIVFLGTGIKTTDSSKNPVTTIENRKAHGYTLYTDDKQTTNSNNQETNSVFLESTNSTQNNIGYHFLNKSKITVKKESHTGKWSDINKSQKDTQKTDEYYEVTQKHSNTDDKYAYVLYPGITKDNFKSKASQVTVVKQDDDFHVVKDNESVWAGVNYSDSTQTFDINGTKVEVKAKGMFILKKKDDNTYECSFYNPESTNSASDIESKISMTGYSITNKNTSNTNESGVRFELTK

SEQ ID NO: 80 - protein, 807 aa, Staphylococcus aureus (strain bovine RF122)
  hyaluronan lyase
MTYKMKKWQKLSTITLLMAGVITLNNGEFRNVDKHQIAVADTNVQTPDYEKLKKTWLDVNYGNDQYDENNQDMKKKFDAKENEAKKLLEDMKTDTNRTYLWSGAENLETNSSHMTKTYRNIEKIAEAMRHKNTSLKTDENKLKIKDAIKWLHHNVYGKDPDKKVADLTTNRKEKDSSKKNNSLNWWDYEIGTPRALTNTLLLMDNMLTKDEMKNYSKPISIYSPSSYKILSSVGESEDAKGGNLVDIAKVKFLESVIEEDVDMMKKSIDSFNKVFTYVQDSATGKARNGFYKDGSYIDHQDVPYTGAYGVVLLEGISQMMPMIKESPFKHTQDKATLSNWIDEGFMPLIYKGEMMDLSRGRAISRENETSHTASATVMKSLLRLSDTMDESTKTKYKQIVKTSVKSDSSYDSNDTLNSYSDIDKMKKLMNDSTISKNDLTQQLKIYNDMDRVTYHNKELDFAFGLSMTSKNIARYENINGENLKGWHTGAGMSYLYNSDVKHYRDNFWATADMTRLPGTTTLNDMPSTNTKNDKSFVGGTKLNNKYASIGMDFENQDKTLTAKKSYFILNDKIVFIGTGIKSTDSSKNPVTSVENRKANGYKLFKGDIEITTSDVNAQETHSVFLESNDTKKNIGYHFLDKPKITVKKESHTGKWSEINKSQKTDDKKDEYYEVTQTHNTSDSKYAYVLYPGLSKSDFKSKNNNVSIVKQDEDFHVIKDNDGVFAGVNYSDSTKSFDINGTIVELKEKGMFVIKKKDDNTYECSFYNPTSTNSTSNKESKISVTGYTITNQSVSNFKESDIHFELTK

SEQ ID NO: 81 - protein, 807 aa, Staphylococcus aureus (strain USA300); identical to SEQ ID NO: 33
  hyaluronan lyase

SEQ ID NO: 82 - protein, 1066 aa, Streptococcus pneumoniae
  hyaluronan lyase
MQTKTKKLIVSLSSLVLSGFLLNHYMTIGAEETTTNTIQQSQKEVQYQQRDTKNLVENGDFGQTEDGSSPWTGSKAQGWSAWVDQKNSADASTRVIEAKDGAITISSHEKLRAALHRMVPIEAKKKYKLRFKIKTDNKIGIAKVRIIEESGKDKRLWNSATTSGTKDWQTIEADYSPTLDVDKIKLELFYETGTGTVSFKDIELVEVADQLSEDSQTDKQLEEKIDLPIGKKHVFSLADYTYKVENPDVASVKNGILEPLKEGTTNVIVSKDGKEVKKIPLKILASVKDAYTDRLDDWNGIIAGNQYYDSKNEQMAKLNQELEGKVADSLSSISSQADRTYLWEKFSNYKTSANLTATYRKLEEMAKQVTNPSSRYYQDETVVRTVRDSMEWMHKHVYNSEKSIVGNWWDYEIGTPRAINNTLSLMKEYFSDEEIKKYTDVIEKFVPDPEHFRKTTDNPFKALGGNLVDMGRVKVIAGLLRKDDQEISSTIRSIEQVFKLVDQGEGFYQDGSYIDHTNVAYTGAYGNVLIDGLSQLLPVIQKTKNPIDKDKMQTMYHWIDKSFAPLLVNGELMDMSRGRSISRANSEGHVAAVEVLRGIHRIADMSEGETKQCLQSLVKTIVQSDSYYDVFKNLKTYKDISLMQSLLSDAGVASVPRPSYLSAFNKMDKTAMYNAEKGFGFGLSLFSSRTLNYEHMNKENKRGWYTSDGMFYLYNGDLSHYSDGYWPTVNPYKMPGTTETDAKRADSDTGKVLPSAFVGTSKLDDANATATMDFTNWNQTLTAHKSWFMLKDKIAFLGSNIQNTSTDTAATTIDQRKLESGNPYKVYVNDKEASLTEQEKDYPETQSVFLESFDSKKNIGYFFFKKSSISMSKALQKGAWKDINEGQSDKEVENEFLTISQAHKQNRDSYGYMLIPNVDRATFNQMIKELESSLIENNETLQSVYDAKQGVWGIVKYDDSVSTISNQFQVLKRGVYTIRKEGDEYKIAYYNPETQESAPDQEVFKKLEQAAQPQVQNSKEKEKSEEEKNHSDQKNLPQTGEGQSILASLGFLLLGAFYLFRRGKNN

SEQ ID NO: 83 - protein, 1078 aa, Streptococcus pneumoniae (strain ATCC BAA-255/R6)
  hyaluronan lyase
MILQYVYWSVYMQTKTKKLIVSLSSLVLSGFLLNHYMTVGAEETTTNTIQQSQKEVQYQQRDTKNLVENGDFGQTEDGSSPWTGSKAQGWSAWVDQKNSSADASTRVIEAKDGAITISSPEKLRAAVHRMVPIEAKKKYKLRFKIKTDNKVGIAKVRIIEESGKDKRLWNSATTSGTKDWQTIEADYSPTLDVDKIKLELFYETGTGTVSFKDIELVEVADQPSEDSQTDKQLEEKIDLPIGKKHVFSLADYTYKVENPDVASVKNGILEPLKEGTTNVIVSKDGKEVKKIPLKILASVKDTYTDRLDDWNGIIAGNQYYDSKNEQMAKLNQELEGKVADSLSSISSQADRIYLWEKFSNYKTSANLTATYRKLEEMAKQVTNPSSRYYQDETVVRTVRDSMEWMHKHVYNSEKSIVGNWWDYEIGTPRAINNTLSLMKEYFSDEEIKKYTDVIEKFVPDPEHFRKTTDNPFKALGGNLVDMGRVKVIAGLLRKDDQEISSTIRSIEQVFKLVDQGEGFYQDGSYIDHTNVAYTGAYGNVLIDGLSQLLPVIQKTKNPIDKDKMQTMYHWIDKSFAPLLVNGELMDMSRGRSISRANSEGHVAAVEVLRGIHRIADMSEGETKQRLQSLVKTIVQSDSYYDVFKNLKTYKDISLMQSLLSDAGVASVPRTSYLSAFNKMDKTAMYNAEKGFGFGLSLFSSRTLNYEHMNKENKRGWYTSDGMFYLYNGDLSHYSDGYWPTVNPYKMPGTTETDAKRADSDTGKVLPSAFVGTSKLDDANATATMDFTNWNQTLTAHKSWFMLKDKIAFLGSNIQNTSTDTAATTIDQRKLESSNPYKVYVNDKEASLTEQEKDYPETQSVFLESSDSKKNIGYFFFKKSSISMSKALQKGAWKDINEGQSDKEVENEFLTISQAHKQNGDSYGYMLIPNVDRATFNQMIKELESSLIENNETLQSVYDAKQGVWGIVKYDDSVSTISNQFQVLKRGVYTIRKEGDEYKIAYYNPETQESAPDQEVFKKLEQAAQPQVQNSKEKEKSEEEKNHSDQKNLPQTGEGQSILASLGFLLLGAFYLFRRGKNN

SEQ ID NO: 84 - protein, 1067 aa, Streptococcus pneumoniae serotype 2 (strain D39/N)
  hyaluronan lyase
MQTKTKKLIVSLSSLVLSGFLLNHYMTVGAEETTTNTIQQSQKEVQYQQRDTKNLVENGDFGQTEDGSSPWTGSKAQGWSAWVDQKNSSADASTRVIEAKDGAITISSPEKLRAAVHRMVPIEAKKKYKLRFKIKTDNKVGIAKVRIIEESGKDKRLWNSATTSGTKDWQTIEADYSPTLDVDKIKLELFYETGTGTVSFKDIELVEVADQPSEDSQTDKQLEEKIDLPIGKKHVFSLADYTYKVENPDVASVKNGILEPLKEGTTNVIVSKDGKEVKKIPLKILASVKDTYTDRLDDWNGIIAGNQYYDSKNEQMAKLNQELEGKVADSLSSISSQADRIYLWEKFSNYKTSANLTATYRKLEEMAKQVTNPSSRYYQDETVVRTVRDSMEWMHKHVYNSEKSIVGNWWDYEIGTPRAINNTLSLMKEYFSDEEIKKYTDVIEKFVPDPEHFRKTTDNPFKALGGNLVDMGRVKVIAGLLRKDDQEISSTIRSIEQVFKLVDQGEGFYQDGSYIDHTNVAYTGAYGNVLIDGLSQLLPVIQKTKNPIDKDKMQTMYHWIDKSFAPLLVNGELMDMSRGRSISRANSEGHVAAVEVLRGIHRIADMSEGETKQRLQSLVKTIVQSDSYYDVFKNLKTYKDISLMQSLLSDAGVASVPRTSYLSAFNKMDKTAMYNAEKGFGFGLSLFSSRTLNYEHMNKENKRGWYTSDGMFYLYNGDLSHYSDGYWPTVNPYKMPGTTETDAKRADSDTGKVLPSAFVGTSKLDDANATATMDFTNWNQTLTAHKSWFMLKDKIAFLGSNIQNTSTDTAATTIDQRKLESSNPYKVYVNDKEASLTEQEKDYPETQSVFLESSDSKKNIGYFFFKKSSISMSKALQKGAWKDINEGQSDKEVENEFLTISQAHKQNGDSYGYMLIPNVDRATFNQMIKELESSLIENNETLQSVYDAKQGVWGIVKYDDSVSTISNQFQVLKRGVYTIRKEGDEYKIAYYNPETQESAPDQEVFKKLEQAAQPQVQNSKEKEKSEEEKNHSDQKNLPQTGEGQSILASLGFLLLGAFYLFRRGKNN

SEQ ID NO: 85 - protein, 805 aa, Streptococcus pyogenes serotype M1
  hyaluronan lyase
MNTYFCTHHKQLLLYSNLFLSFAMMGQGTAIYADTLTSNSEPNNTYFQTQTLTTTDSEKKVVQPQQKDYYTELLDQWNSIIAGNDAYDKTNPDMVTFHNKAEKDAQNIIKSYQGPDHENRTYLWEHAKDYSASANITKTYRNIEKIAKQITNPESCYYQDSKAIAIVKDGMAFMYEHAYNLDRENHQTTGKENKENWWVYEIGTPRAINNTLSLMYPYFTQEEILKYTAPIEKFVPDPTRFRVRAANFSPFEANSGNLIDMGRVKLISGILRKDDLEISDTIKAIEKVFTLVDEGNGFYQDGSLIDHVVTNAQSPLYKKGIAYTGAYGNVLIDGLSQLIPIIQKTKSPIKADKMATIYHWINHSFFPIIVRGEMMDMTRGRSISRFNAQSHVAGIEALRAILRIADMSEEPHRLALKTRIKTLVTQGNAFYNVYDNLKTYHDIKLMKELLSDTSVPVQKLDSYVASFNSMDKLALYNNKHDFAFGLSMFSNRTQNYEAMNNENLHGWFTSDGMFYLYNNDLGHYSENYWATVNPYRLPGTTETEQKPLEGTPENIKTNYQQVGMTGLSDDAFVASKKLNNTSALAAMTFTNWNKSLTLNKGWFILGNKIIFVGSNIKNQSSHKAYTTIEQRKENQKYPYCSYVNNQPVDLNNQLVDFTNTKSIFLESDDPAQNIGYYFFKPTTLSISKALQTGKWQNIKADDKSPEAIKEVSNTFITIMQNHTQDGDRYAYMMLPNMTRQEFETYISKLDIDLLENNDKLAAVYDHDSQQMHVIHYGKKATMFSNHNLSHQGFYSFPHPVRQNQQ

SEQ ID NO: 86 - protein, 780 aa, Streptococcus pyogenes serotype M2 (strain MGAS10)
  hyaluronan lyase
MVYFYLVNQSTFIISFLYWRNVSVNTYFCTHHKQLLLYSNLFLSFAMIGQGTAIYADTLTSNSEPNNTYFQTQTLTTTDSEKKVVQPQQKDYYTELLDQWNSIIAGNDAYDKTNPDMVTFHNKAEKDAQNIIKSYQGPDHENRTYLWEHAKDYSASTNITKTYRNIEKIAKQITNPESCYYQDSKAIAIVKDGMAFMYEHAYNLNRENHQTTGKENKENWWVYEIGTPRAINNTLSLMYPYFTQEEILKYTAPIEKFVPDPTRFRVRAANFSPFEANSGNLIDMGRVKLISGILRKDDLEISDTIKAIEKVFTLVDEGNGFYQDGSLIDHVVTNTQSPLYKKGIAYTGAYGNVLIDGLSQLIPIIQKTKSPIEADKMATIYHWINHSFFPIIVRGEMMDMTRGRSISRFNAQSHVAGIEALRAILRIADMSEEPHRLELKTRIKTLVTQGNAFYNVYDNLKTYHDIKLMKELLSDTSVPVQKLDSYVASFNSMDKLALYNNKHDFAFGLSMFSNRTQNYEAMNNENLHGWFTSDGMFYLYNNDLGHYSENYWATVNPYRLPGTTETEQKPLEGTPENIKTNYQQVGMTSLSDDAFVASKKLNNTSALAAMTFTNWNKSLTLNKGWFILGNKIIFVGSNIKNQSSHKAYTTIEQRKENQKHPYCSYVNNQPVDLNNQLVDFTNTKSIFLESDDPAQNIGYYFFKPRTLSISKALQTGKWQNIKADDKSPEAIKEVSNTFITIMQNHTQEGDRYAYMMLPNMTRQEFETYISKLDIDLLENN

SEQ ID NO: 87 - protein, 868 aa, Streptococcus pyogenes serotype M4 (strain MGAS10)
  hyaluronan lyase
MNTYFCTHHKQLLLYSNLFLSFAMMGQGTAIYADTLTSNSKPNNTYFQTQTLTTTDSEKKVVQPQQKDYYTELLDQWNSIIAGNDAYDKTNPDMVTFHNKAEKDAQNIIKSYQEPDHENRTYLWEHAKDYSASANITKTYRNIEKIAKQITNPESCYYQDSKAIAIVKDGMAFMYEHAYNLDRENHQTTGKENKENWWDYEIGTPRAINNTLSLMYPYFTQEEILKYTAPIEKFVPDPTRFRVRAANFPPFEANSGNLIDMGRVKLISGILRKDDLEISDTIKAIEKVFTLVDEGNGFYQDGSLIDHVVTNAQSPLYKKGIAYTGAYGNVLIDGLSQLIPIIQKTKSPIEADKMATIYHWINHSFFPIIVRGEMMDMTRGRSISRFNAQSHVAGIEALRAILRIADMSEEPHRLALKTRIKTLVTQGNVFYNVYDNLKTYHDIKLMKELLSDTSVPVQKLDSYVASFNSMDKLALYNNKHDFAFGLSMFSNRTQNYEAMNNENLHGWFTSDGMFYLYNNDLGHYSENYWATVNPYRLPGTTETEQKPLEGTPENIKTNYQQVGMTSLSDDAFVASKKLNNTSALAAMTFTNWNKSLTLNKGWFILGNKIIFVGSNIKNQSSHKAYTTIEQRKENQKHPYCSYVNNQPVDLNNQLVDFTNTKSIFLESDDPAQNIGYYFFKPTTLSISKALQTGKWQNIKADDKSPEAIKEVSNTFITIMQNHTQDGDRYAYMMLPNMTRQEFETYISKLDIDLLENNDKLAAVYDHDSQQMHVIHYEKKATTFSNHNLSHQGFYSFPHPVKQNQQQKLAHQGIAAKNNALNSHKIPHKRQRRLPRTGYQSSSLEFLGGALVASFNHITKPFRKKDLRI

SEQ ID NO: 88 - protein, 828 aa, Streptococcus pyogenes serotype M6
  hyaluronan lyase
MVYFYLVDQFTFIISFLYWRNLSVNTYFCTHHKQLLLYSNLFLSFAMMGQGTAIYADTLTSNSEPNNTYFQTQTLTTTDSEKKVVQPQQKDYYTELLDQWNSIIAGNDAYDKTNPDMVTFHNKAEKDAQNIIKSYQGPDHENRTYLWEHAKDYSASTNITKTYRNIEKIAKQITNPESCYYQDSKAIAIVKDGMAFMYEHAYNLDRENHQTTGKENKENWWVYEIGTPRAINNTLSLMYPYFTQEEILKYTAPIEKFVPDPTRFRVRAANFSPFEANSGNLIDMGRVKLISGILRKDDLEISDTIKAIEKVFTLVDEGNGFYQDGSLIDHVVTNAQSPLYKKGIAYTGAYGNVLIDGLSQLIPIIQKTKSPIEADKMATIYHWINHSFFPIIVRGEMMDMTRGRSISRFNAQSHVAGIEALRAILRIADMSEEPHRLALKTRIKTLVTQGNAFYNVYDNLKTYHDIKLMKELLSDTFVPVQKLDSYVASFNSMDKLALYNNKHDFAFGLSMFSNRTQNYEAMNNENLHGWFTSDGMFYLYNNDLGHYSENYWATVNPYRLPGTTETEQKPLEGTPENIKTDYQQVGMTSLSDDAFVASKKLNNTSALAAMTFTNWNKSLTLNKGWFILGNKIIFVGSNIKNQSSHKAYTTIEQRKENQKHPYCSYVNNQPVDLNNQLVDFTNTKSIFLESDDPAQNIGYYFFKPTTLSISKALQTGKWQNIKADDKSPEAIKEVSNTFITIMQNHTQDGDRYAYMMLPNMTRQEFETYISKLDIDLLENNDKLAAVYDHDSQQMHVIHYEKKATMFSNHNLSHQGFYSFPHPVKQNQQ

SEQ ID NO: 89 - protein, 556 aa, Streptococcus pyogenes serotype M12 (strain MGAS2)
  hyaluronan lyase
MVYFYLVNQSTFIISFLYWRNLSVNTYFCTHHKQLLLYSNLFLSFAMMGQGTAIYADTLTSNSEPNNTYFQTQTLTTTDSEKKVVQPQQKDYYTELLDQWNSIIAGNDAYDKTNPDMVTFHNKAEKDAQNIIKSYQGPDHENRTYLGNMQRIIPLLLISRKLTAILKKISKMKSLMEDSTISTNGLTQQLKIYNDMDRVTYHNKGLDFAFGLSMTSKNVARYESINGENLKGWHTGAGMSYLYNSDVKHYRDNFWATADMKRLAGTTTLDNEEPKSTDVKKSSKTFVGGTKFDDQHASIGMDFENQDKTLTAKKSYFILNDKIVFLGTGIKSTDSSKNPVTTIENRKANDYKLYKDDTQTTNSDNQETNSLFLESTNSTQNNIGYHFLNESKITVKKESHTGKWSDINKSQKDIQKTDEYYEVTQKHSNTDSKYAYVLYPGLSKDVFKSKASKVTVVKQEDDFHVVKDNESVWAGINYSDSAKTFEINNTKVEVKAKGMFILTKKDDNTYECSFYNPESTNSVSDIESKISMTGYSIINKNTSTSNESGVRFELTK

SEQ ID NO: 90 - protein, 635 aa, Streptococcus pyogenes serotype M12 (strain MGAS2)
  hyaluronan lyase
MAFMYEHAYNLNRENHQTTGKENKENWWVYEIGTPRAINNTLSLMYPYFTQEEILKYTAPIEKFVPDPTRFRVRAANFSPFEASSGNLIDMGRVKLISGILRKDDLEISDTIKAIEKVFTLVDEGNGFYQDGSLIDHVVTNAQSPLYKKGIAYTGAYGNVLIDGLSQLIPIIQKTKSPIEADKMATIYHWINHSFFPIIVRGEMMDMTRGRSISRFNAQSHVAGIEALRAILRIADMSEEPHRLALKTRIKTLVTQGNAFYNVYDNLKTYHDIKLMKELLSDTSVPVQKLDSYVASFNSMDKLALYNNKHDFAFGLSMFSNRTQNYEAMNNENLHGWFTSDGMFYLYNNDLGHYSENYWATVNPYRLPGTTETEQKPLEGTPENIKTNYQQVGMTSLSDDAFVASKKLNNTSALAAMTFTNWNKSLTLNKGWFILGNKIIFVGSNIKNQSSHKAYTTIEQRKENQKHPYCSYVNNQPVDLNNQLVDFTNTKSIFLESDDPAQNIGYYFFKPTTLSISKALQTGKWQNIKADDKSPEAIKEVSNTFITIMQNHTQDGDRYAYMMLPNMTRQEFETYISKLDIDLLENNDKLAAVYDHDSQQMHVIHYEKKATMFSNHNLSHQGFYSFPHPVKQNQQ

SEQ ID NO: 91 - protein, 828 aa, Streptococcus pyogenes serotype M12 (strain MGAS9)
  hyaluronan lyase
MVYFYLVNQSTFIISFLYWRNLSVNTYFCTHHKQLLLYSNLFLSFAMMGQGTAIYADTLTSNSEPNNTYFQTQTLTTTDSEKKVVQPQQKDYYTELLDQWNSIIAGNDAYVKTNPDMVTFHNKAEKDAQNIIKSYQGPDHENRTYLWEHAKDYSASTNITKTYRNIEKIAKQITNPESCYYQDSKAIAIVKDGMAFMYEHAYNLNRENHQTTGKENKENWWVYEIGTPRAINNTLSLMYPYFTQEEILKYTAPIEKFVPDPTRFRVRAANFSPFEASSGNLIDMGRVKLISGILRKDDLEISDTIKAIEKVFTLVDEGNGFYQDGSLIDHVVTNAQSPLYKKGIAYTGAYGNVLIDGLSQLIPIIQKTKSPIEADKMATIYHWINHSFFPIIVRGEMMDMTRGRSISRFNAQSHVAGIEALRAILRIADMSEEPHRLALKTRIKTLVTQGNAFYNVYDNLKTYHDIKLMKELLSDTSVPVQKLDSYVASFNSMDKLALYNNKHDFAFGLSMFSNRTQNYEAMNNENLHGWFTSDGMFYLYNNDLGHYSENYWATVNPYRLPGTTETEQKPLEGTPENIKTNYQQVGMTSLSDDAFVASKKLNNTSALAAMTFTNWNKSLTLNKGWFILGNKIIFVGSNIKNQSSHKAYTTIEQRKENQKHPYCSYVNNQPVDLNNQLVDFTNTKSIFLESDDPAQNIGYYFFKPTTLSISKALQTGKWQNIKADDKSPEAIKEVSNTFITIMQNHTQDGDRYAYMMLPNMTRQEFETYISKLDIDLLENNDKLAAVYDHDSQQMHVIHYEKKATMFSNHNLSHQGFYSFPHPVKQNQQ

SEQ ID NO: 92 - protein, 828 aa, Streptococcus pyogenes serotype M28
  hyaluronan lyase
MVYFYLVNQFTFIISFLYRRNLSVNTYFCTHHKQLLLYSNLFLSFAMMGQGTAIYADTLTSNSEPNNTYFQTQMLTTTDSEKKVVQPQQKDYYTELLDQWNSIIAGNDAYDKTNPDMVTFHNKAEKDAQNIIKSYQGPDHENRTYLWEHAKDYSASANITKTYRNIEKIAKQITNPESCYYQDSKAIAIVKDGMAFMYEHAYNLDRENHQTTGKENKENWWVYEIGTPRAINNTLSLMYPYFTQEEILKYTAPIEKFVPDPTRFRVRAANFSPFEANSGNLIDMGRVKLISGILRKDDLEISDTIKAIEKVFTLVDEGNGFYQDGSLIDHVVTNAQSPLYKKGIAYTGAYGNVLIDGLSQLIPIIQKTKSSIEADKMATIYHWINHSFFPIIVRGEMMDMTRGRSISRFNAQSHVAGIEALRAILRIADMSEEPHRLALKTRIKTLVTQGNAFYNVYDNLKTYHDIKLMKELLSDTSVPVQKLDSYVASFNSMDKLALYNNKHDFAFGLSMFSNRTQNYEAMNNENLHGWFTSDGMFYLYNNDLGHYSENYWATVNPYRLPGTTETEQKPLEGTPENIKTNYQQVGMTSLSDDAFVASKKLNNTSALAAMTFTNWNKSLTLNKGWFILGNKIIFVGSNIKNQSSHKAYTTIEQRKENQKHPYHAYVNNQPVDLNNQLVDFTNTKSIFLESDDSAQNIGYYFFKPTTLSISKALQTGKWQNIKADDKSPEAIKEVSNTFITIMQNHTQDGDRYAYMMLPNMTRQEFETYISKLDIDLLENNDKLAAVYDHDSQQMHVIHYEKKATMFSNHNLSHQGFYSFPHPVKQNQQ

SEQ ID NO: 93 - protein, 522 aa, Streptococcus suis
  hyaluronan lyase
MGFFISQSKQHYGIRKYKVGVCSALIALSILGTRVAANQLPSTETASPQSSQLVETTPETTEAVNLTTEAVMTSEVSSEVSPVTSTETQPSSTAAETLASPQAVQATKEEEKNLVANGEFASTTAASGNWADPAATNWETWIPANVKKENGQVRIDEGRLHISSTASYRVAVHQTVDVDPNKRYLFSYNVETKDLKGSGVRVRLRSLTAEGKDLSPQEFAYTPYKNGSQAEHIEQILTVSPETRKLKVELFFENSVGQAWLDNISLVEYVEKTPETPEPSLELVQPETGQISLASNKVYLPVRPDLTYRIADAAVAIVEKNMIRPLAAGKTQVDVYDKDTKLSSFELTVTEHQATVFDTLRNNWEDISLANKRYQSNDTQMKAFLGRLDAGVASSLKKWVEPTNQGKTIFNDIDFSKSSHLTTVYRRLEQMAQVVENPDSAYYHDRSLIDLVRKGMNWLYTNVYNENKSIDGNWWDYEIGTPRAVVNTLIYMHPYFSQEEILTYTKPISKFVPDPTTISVKH

SEQ ID NO: 94 - protein, 1164 aa, Streptococcus suis
  hyaluronan lyase
MGFFISQSKQHYGIRKYKVGVCSALIALSILGTRVAANQLPSTETASPQSSQLVETTPETTEAVMTSEVSSEVSPVTSTETQPSSTTAETLASPQAVQATKEEKNLVANGEFISTTAPSGNWKELAATNWETWIPANVKKENGQVRIDEGRLHISSTASYRVAVHQTVDVDPNKRYLFSYDVETKDLKGSGVRVRLRSLTAEGKDLSPQEFAYTPYKNGSQAEHIEQILTVSPETRKLKVELFFENSVGQAWLDNISLVEYVEKTPETPEQSPELVQPETGQISLASNKVYLPVRPDLTYRIADAAVATVEKNMIRPLAAGKTQVDVYDKDTKLSSFELIVTEHQATVFDTLRNNWEDISLANKRYQSNDAQMKAFLGRLDAGVASSLEKWVEPTEQSKTIFNDIDFSKSSHLTTVYRRLEQMAQVVENPDSAYYHDRSLIDLVRKGMNWLYANVYNENKSIDGNWWDYEIGTSRAVVNTLIYMHPYFSQEEILTYTKPISKFVPDPTTIRKTLTNPVPAVGGNQTDLSKVAILEGALREDADRVRAGAQGLTTIMKFVDKGEGFYRDGSFIDHTNVAYTGAYGNVLIEGFSQLLPVIQPTEFALKEEQTNILYEWIEKAFMPILVRGELMDMTRGRSISRATGESHVQAMEILRSLVRIAESAQPEQKTKLLSFVKAQLTSDTFYDSYRSLKSYKDIDLVNKLLADNQIPAEVDKDYIAAFNNMDKFVYRSAQEGFTFALSMYSSRTQNYEDMNNENRKGWYTADGMVYLYNDDLSHYSNHYWATVDPYRLPGTTTTKDKREDGSGEVTLASDFVGASQLGNRLATIAMDFNNWNNSLTARKAWIVLGNKIVFLGTDIQHQSAQGAETTIENRKLLTGEKYSYYINGQPVDLSKEVVTDKTQSFYMTNGKDNQSIGYVFLNQLPTHAKLDQRTGKWSDINYNQSKEEVSNSFVSLWHEHAQTSSNYAYVLVPNQSMEKVNQAAASVKLLHQDRDLQVVYDQEQNVWGVVKYTDTAYKLTDDITLTDAGLYTIQKVEGGYRIAFYNPSTRTVKNGIELTKAGSSLTVEMEPTAAYPSTVWKVTMPEGSDKQTGSVEKTEKEEKQLKENQPSSEVKQVVHHAAEKTKPSKPRLPQTGEEASLGLGFLGLLTLGAVVDFKCRRSHS

SEQ ID NO: 95 - protein, 1164 aa, Streptococcus suis
  hyaluronan lyase
MGFFISQSKQHYGIRKYKVGVCSALIALSILGTRVAANQLPSTETASPQSSQLVETTPETTEAVMTSEVSSEVSPVTSTETQPSSTTAETLASPQAVQATKEEKNLVANGEFISTTAPSGNWKELAATNWETWIPANVKKENGQVRIDEGRLHISSTASYRVAVHQTVDVDPNKRYLFSYDVETKDLKGSGVRVRLRSLTAEGKDLSPQEFAYTPYKNGSQAEHIEQILTVSPETRKLKVELFFENSVGQAWLDNISLVEYVEKTPETPEQSPELVQPETGQISLASNKVYLPVRPDLTYRIADAAVATVEKNMIRPLAAGKTQVDVYDKDTKLSSFELIVTEHQATVFDTLRNNWEDISLANKRYQSNDAQMKAFLGRLDAGVASSLEKWVEPTEQSKTIFNDIDFSKSSHLTTVYRRLEQMAQVVENPDSAYYHDRSLIDLVRKGMNWLYTNVYNENKSIDGNWWDYEIGTPRAVVNTLIYMHPYFSQEEILTYTKPISKFVPDPTTIRKTLTNPVPAVGGNQTDLSKVAILEGALREDADRVRAGAQGLTTIMKFVDKGEGFYRDGSFIDHTNVAYTGAYGNVLIEGFSQLLPVIQPTEFALKEEQTNILYEWIEKAFMPILVRGELMDMTRGRSISRATGESHVQAMEILRSLVRIAESAQPEQKTKLLSFVKAQLTSDTFYDSYRSLKSYKDIDLVNKLLADNQIPAEVDKDYIAAFNNMDKFVYRSAQEGFTFALSMYSSRTQNYEDMNNENRKGWYTADGMVYLYNDDLSHYSNHYWATVDPYRLPGTTTTKDKREDGSGEVTLASDFVGASQLGNRLATIAMDFNNWNNSLTARKAWIVLGNKIVFLGTDIQHQSAQGAETTIENRKLLTGEKYSYYINGQPVDLSKEVVTDKTQSFYMTNGKDNQSIGYVFLNQLPTHAKLDQRTGKWSDINYNQSKEEVSNSFVSLWHEHAQTSSNYAYVLVPNQSMEKVNQAAASVKLLHQDRDLQVVYDQEQNVWGVVKYTDTAYKLTDDITLTDAGLYTIQKVEGGYRIAFYNPSTRTVKNGIELTKAGSSLTVEMEPTAAYPSTVWKVTMPEGSDKQTGSVEKTEKEEKQLKENQPSSEVKQVVHHAAEKTKPSKPRLPQTGEEASLGLGFLGLLTLGAVVDFKCRRSHS

SEQ ID NO: 96 - protein, 802 aa, Vibrio fischeri (strain ATCC 700601 / ES114)
  hyaluronan lyase
MYMIKKHRLNTIALSMLFLFTGNAYAAKNTQTPQYLPSDFEQVRENWAENYLGDPAITFDQTLKNMVTSTNSSAQKHWDSMTPQPNASGIWDDLPLIDKDTTLGPNIRNSYQRLFTMAKAYRLRDGNLENNQLMLNDIMTAMNYINQNFYFVNQLEYGNWWQWELAIPKDIHNILVLLFDDIKDNYQTIITNHLNATRYFTPDPTHLGVSPGAAESTNPNYRESTGGNRTDNAQVVLIRGMLENNSEEISQAIAALPAVIEYVSEGDGYYTDGSFLQHSDIAYNGTYGNVLLGGLGIQMNAVAGSPWSMDNQTISNVYNIINQSYEPLLYKGAMMDMVNGRSISRSAEQNHDVGLNIVNSMLFYTNGPDSDKNKQLSSLIKTQITDDTYQNFFDKIYYVSTYQAAQHIVNDPTVSLKDPLIGNFSYPSMDRIVHRRTDWAFALAMHSYRIGNYECMNGENLKGWFTGDGMIYLYNDQLDHYTGYWPTVNASRMPGTTVDSQIMADCSGERVGGNVNTNMQWVGSTSLNNYGIAGMQFYNWSDTLSAYKSWFMFDNEVVMLGSNIKDQSNANNITTIENRKRLAETKLFIDGTEQAALPYQGAPATFSIRNKTLANSDLSYVMLTPKTISISQNDVDGNWSDIGNSKGDVSDSYLQATLTQVDQADYQYALLPNQNNDTVQNYAQHPDVTVLRQDEQAHAVQENTLNIIAANNWKNNPVNITDTITLNSMMGFMIKEESSNTFTVAVSEPIQTIDSVNFTFDKQGIVIKEDIENRVVLNGTTLTINTSGLQGQSYSFQVTIQD

SEQ ID NO: 97 - protein, 517 aa, Synechococcus sp. (strain RCC307)
  hyaluronan lyase
MGAPAIPKVPRSPSKSEHTTRPNSGESEVVRQAEELFEQTLVNVRGQLAGAVAALESSVHDSELNYGEIFLRDNVPVMVYLLLRGRFEIVRHFLDLCLELQSRSYRTRGVFPTSFVEEDDKILADYGQRSIGRITSVDASLWWPVLCWMYVRASGDTSYGTSPKVQRAVQLLLDLVLQPSFYEPPVLFVPDCAFMIDRPMDVWGAPLEVEVLLFGCLKSCCQLMSLVEGGGHGGPLIQQRLELTRTWMRDLRVYLLNHYWVTSKTMQVLRRRPTEQYGDYQSRNEFNVQPEVIPHWLQEWLDDRGGYLIGNMRTGRPDFRFYSLGNALGSLFGLLTGPQQLALFRLVIHNRQHLMAEMPMRICHPPMDQDEWITNTGMDPKNWPWSYHNGGHWPSLLWPMAAAVLMHQRLYPNDDLLLLGQTRTMLEECYWQQLNQLPRQQWAEYFDGPTGTWVGQQARINQTWTIVGFLLLHHLMRKAPQDVKLLDLDDVGPLRLSFQDQHEKSSTDERKSFLKNY

SEQ ID NO: 98 - protein, 1021 aa, Proteus vulgaris
  chondroitin-sulfate-ABC endolyase
MPIFRFTALAMTLGLLSAPYNAMAATSNPAFDPKNLMQSEIYHFAQNNPLADFSSDKNSILTLSDKRSIMGNQSLLWKWKGGSSFTLHKKLIVPTDKEASKAWGRSSTPVFSFWLYNEKPIDGYLTIDFGEKLISTSEAQAGFKVKLDFTGWRAVGVSLNNDLENREMTLNATNTSSDGTQDSIGRSLGAKVDSIRFKAPSNVSQGEIYIDRIMFSVDDARYQWSDYQVKTRLSEPEIQFHNVKPQLPVTPENLAAIDLIRQRLINEFVGGEKETNLALEENISKLKSDFDALNIHTLANGGTQGRHLITDKQIIIYQPENLNSQDKQLFDNYVILGNYTTLMFNISRAYVLEKDPTQKAQLKQMYLLMTKHLLDQGFVKGSALVTTHHWGYSSRWWYISTLLMSDALKEANLQTQVYDSLLWYSREFKSSFDMKVSADSSDLDYFNTLSRQHLALLLLEPDDQKRINLVNTFSHYITGALTQVPPGGKDGLRPDGTAWRHEGNYPGYSFPAFKNASQLIYLLRDTPFSVGESGWNNLKKAMVSAWIYSNPEVGLPLAGRHPFNSPSLKSVAQGYYWLAMSAKSSPDKTLASIYLAISDKTQNESTAIFGETITPASLPQGFYAFNGGAFGIHRWQDKMVTLKAYNTNVWSSEIYNKDNRYGRYQSHGVAQIVSNGSQLSQGYQQEGWDWNRMEGATTIHLPLKDLDSPKPHTLMQRGERGFSGTSSLEGQYGMMAFNLIYPANLERFDPNFTAKKSVLAADNHLIFIGSNINSSDKNKNVETTLFQHAITPTLNTLWINGQKIENMPYQTTLQQGDWLIDSNGNGYLITQAEKVNVSRQHQVSAENKNRQPTEGNFSSAWIDHSTRPKDASYEYMVFLDATPEKMGEMAQKFRENNGLYQVLRKDKDVHIILDKLSNVTGYAFYQPASIEDKWIKKVNKPAIVMTHRQKDTLIVSAVTPDLNMTRQKAATPVTINVTINGKWQSADKNSEVKYQVSGDNTELTFTSYFGIPQEIKLSPLP

SEQ ID NO: 99 - protein, 684 aa, Pedobacter heparinus
  chondroitin AC lyase
PALLIAQQTGTAELIMKRVMLDLKKPLRNMDKVAEKNLNTLQPDGSWKDVPYKDDAMTNWLPNNHLLQLETIIQAYIEKDSHYYGDDKVFDQISKAFKYWYDSDPKSRNWWHNEIATPQALGEMLILMRYGKKPLDEALVHKLTERMKRGEPEKKTGANKTDIALHYFYRALLTSDEALLSFAVKELFYPVQFVHYEEGLQYDYSYLQHGPQLQISSYGAVFITGVLKLANYVRDTPYALSTEKLAIFSKYYRDSYLKAIRGSYMDFNVEGRGVSRPDILNKKAEKKRLLVAKMIDLKHTEEWADAIARTDSTVAAGYKIEPYHHQFWNGDYVQHLRPAYSFNVRMVSKRTRRSESGNKENLLGRYLSDGATNIQLRGPEYYNIMPVWEWDKIPGITSRDYLTDRPLTKLWGEQGSNDFAGGVSDGVYGASAYALDYDSLQAKKAWFFFDKEIVCLGAGINSNAPENITTTLNQSWLNGPVISTAGKTGRGKITTFKAQGQFWLLHDAIGYYFPEGANLSLSTQSQKGNWFHINNSHSKDEVSGDVFKLWINHGARPENAQYAYIVLPGINKPEEIKKYNGTAPKVLANTNQLQAVYHQQLDMVQAIFYTAGKLSVAGIEIETDKPCAVLIKHINGKQVIWAADPLQKEKTAVLSIRDLKTGKTNRVKIDFPQQEFAGATVELK

SEQ ID NO: 100 - protein, 844 aa, Victivallis vadensis ATCC BAA-548
  chondroitin AC lyase
MHRKIVFPLFVLLFTAFAAFAASQPQWKWRQSKYCRITEHAGKKLLTVAIPADAPEISRRNTADTPVGLTCFEGQPIEFSIRLRNSGISRPDNLHNGIKFQLYFRDGNGTERWTQAEIPHEPFPWRRFRFSERIPADATSGTLRLGLQGSSGNVEFDLDSLQIRPLDPELSPVPPTPEQIRECELIESRLRAGLPAQQPPPGPEVKKLLERQNGDGTFRDLDYSARNRSIWPAARHLKRTFELALARATPGHALYRDPAAGEAVRKAVAWWAERQPQNGNWWWNDMYVPKILGNILLLSPELFPDGPRRRAALNVCRQACFLSRYTGNNRVFIAANIFCRALLERNLPVMDRAAAVLSEEIRFAPAEHKTAWSFGGIRADGCYHQHGPQIQFGNYGGEFLANIAYWSNILKETHWELSPEQWRIMRHLTFNGFQWVLWRGRMDLLACGRQLGRNAAETKGERTLNAFAQLRNADPGDRAPYDAALRRNRDGENTLTGNRHFWNSDYMVHRRPTWYASVRMNSVRVRPIEDDTNWDNALGRYFSDGACLVMRSGREYENITACWDWTRLPGTTLPKTPVYTGEDARRFGLKIGGGDLPRWTHSRNWRQLGETGFVGGVTDGERGAAVYTQDLDGVRARKAWFFDRDAIYCLGSGITSTSPYEVATTVNSCLRNGEIQQGDGWFRHDGIGYRGENLKLTAGPRTGDWRYVEGGLTRPVPETKELFTLTVEHGVKPRNASYIYTILPGATPEETAGTPPGRVLRNTPECQAVEFADGVRAAIFYEPGRLDDFETDTPGVFLIGKGTVHAADPTGRHSSFTLKLNGVSRKVPLPAGEFAGQSVKIVLK

SEQ ID NO: 101 - protein, 510 aa, Pan troglodytes
  Chimpanzee PH20
MGVLKFKHIFFRSFVKSSGVSQIVFTFLLIPCCLTLNFRAPPVIPNVPFLWAWNAPSEFCLGKFDEPLDMSLFSFIGSPRINVTGQDVTIFYVDRLGYYPYIDSITGVTVNGGIPQKISLQDHLDKAKKDITFYMPVDNLGMAVIDWEEWRPTWARNWKPKDVYKNRSIELVQQQNVQLSLTEATEKAKQEFEKAGKDFLVETIKLGKLLRPNHLWGYYLFPDCYNHHYKKPGYNGSCFNVEIKRNDDLSWLWNESTALYPSIYLNTQQSPVAATLYVRNRVQEAIRVSKIPDAKSPLPVFVYTRIVFTDQVLKFLSQDELVYTFGETVALGASGIVIWGTLSIMRSMKSCLLLDNYMETILNPYIINVTLAAKMCSQVLCQEQGVCIRKNWNSSDYLHLNPDNFAIQLEKGGKFTVRGKPTLEDLEQFSEKFYCSCYSTLSCKEKADVKDTDAVDVCIADGVCIDAFLKPPMETEESQIFYNASPSTLSATMFIDLCDLYLVPTSYLIL

SEQ ID NO: 102 - protein, 512 aa, Macaca mulatta
  Precursor Rhesus Monkey PH20
MGVLKFKHIFFRSFVKSSGVSQIVFTFLLIPCCLTLNFRAPPIIPNVPFLWAWNAPSEFCLGKFNEPLDMSLFTLMGSPRINITGQGVTIFYVDRLGYYPYIDLTTGVTVHGGIPQKVSLQDHLDKSKQDILFYMPVDNLGMAVIDWEEWRPTWARNWKPKDVYKNRSIELVQQQNVQLSLPQATDKAKQEFEKAGKDFMLETIKLGRSLRPNHLWGYYLFPDCYNHHYRKPGYNGSCFDVEIKRNDDLSWLWNESTALYPSIYLNTQQSVVVATLYVRNRVREAIRVSKIPDAKNPLPVFVYARLVFTDQVLKFLSREELVSTLGETVALGASGIVIWGSLSITRSMKSCLLLDTYMETILNPYIINVTLAAKMCSQVLCQEQGVCIRKDWNSSDYLHLNPDNFDIRLEKGGKFTVHGKPTVEDLEEFSEKFYCSCYTNLSCKEKADVKDTDAVDVCIADGVCIDASLKPPVETEGSPPIFYNTSSSTVSTTMFIWRLEVWDQGISRIGFF

SEQ ID NO: 103 - protein, 505 aa, Homo sapiens
  PH20 precursor 1-505
MGVLKFKHIFFRSFVKSSGVSQIVFTFLLIPCCLTLNFRAPPVIPNVPFLWAWNAPSEFCLGKFDEPLDMSLFSFIGSPRINATGQGVTIFYVDRLGYYPYIDSITGVTVNGGIPQKISLQDHLDKAKKDITFYMPVDNLGMAVIDWEEWRPTWARNWKPKDVYKNRSIELVQQQNVQLSLTEATEKAKQEFEKAGKDFLVETIKLGKLLRPNHLWGYYLFPDCYNHHYKKPGYNGSCFNVEIKRNDDLSWLWNESTALYPSIYLNTQQSPVAATLYVRNRVREAIRVSKIPDAKSPLPVFAYTRIVFTDQVLKFLSQDELVYTFGETVALGASGIVIWGTLSIMRSMKSCLLLDNYMETILNPYIINVTLAAKMCSQVLCQEQGVCIRKNWNSSDYLHLNPDNFAIQLEKGGKFTVRGKPTLEDLEQFSEKFYCSCYSTLSCKEKADVKDTDAVDVCIADGVCIDAFLKPPMETEEPQIFYNASPSTLSATMFIVSILFLIISS

SEQ ID NO: 104 - protein, 503 aa, Homo sapiens
  PH20 precursor 1-503
MGVLKFKHIFFRSFVKSSGVSQIVFTFLLIPCCLTLNFRAPPVIPNVPFLWAWNAPSEFCLGKFDEPLDMSLFSFIGSPRINATGQGVTIFYVDRLGYYPYIDSITGVTVNGGIPQKISLQDHLDKAKKDITFYMPVDNLGMAVIDWEEWRPTWARNWKPKDVYKNRSIELVQQQNVQLSLTEATEKAKQEFEKAGKDFLVETIKLGKLLRPNHLWGYYLFPDCYNHHYKKPGYNGSCFNVEIKRNDDLSWLWNESTALYPSIYLNTQQSPVAATLYVRNRVREAIRVSKIPDAKSPLPVFAYTRIVFTDQVLKFLSQDELVYTFGETVALGASGIVIWGTLSIMRSMKSCLLLDNYMETILNPYIINVTLAAKMCSQVLCQEQGVCIRKNWNSSDYLHLNPDNFAIQLEKGGKFTVRGKPTLEDLEQFSEKFYCSCYSTLSCKEKADVKDTDAVDVCIADGVCIDAFLKPPMETEEPQIFYNASPSTLSATMFIVSILFLII

SEQ ID NO: 105 - protein, 501 aa, Homo sapiens
  PH20 precursor 1-501
MGVLKFKHIFFRSFVKSSGVSQIVFTFLLIPCCLTLNFRAPPVIPNVPFLWAWNAPSEFCLGKFDEPLDMSLFSFIGSPRINATGQGVTIFYVDRLGYYPYIDSITGVTVNGGIPQKISLQDHLDKAKKDITFYMPVDNLGMAVIDWEEWRPTWARNWKPKDVYKNRSIELVQQQNVQLSLTEATEKAKQEFEKAGKDFLVETIKLGKLLRPNHLWGYYLFPDCYNHHYKKPGYNGSCFNVEIKRNDDLSWLWNESTALYPSIYLNTQQSPVAATLYVRNRVREAIRVSKIPDAKSPLPVFAYTRIVFTDQVLKFLSQDELVYTFGETVALGASGIVIWGTLSIMRSMKSCLLLDNYMETILNPYIINVTLAAKMCSQVLCQEQGVCIRKNWNSSDYLHLNPDNFAIQLEKGGKFTVRGKPTLEDLEQFSEKFYCSCYSTLSCKEKADVKDTDAVDVCIADGVCIDAFLKPPMETEEPQIFYNASPSTLSATMFIVSILFL

SEQ ID NO: 106 - protein, 499 aa, Homo sapiens
  PH20 precursor 1-499
MGVLKFKHIFFRSFVKSSGVSQIVFTFLLIPCCLTLNFRAPPVIPNVPFLWAWNAPSEFCLGKFDEPLDMSLFSFIGSPRINATGQGVTIFYVDRLGYYPYIDSITGVTVNGGIPQKISLQDHLDKAKKDITFYMPVDNLGMAVIDWEEWRPTWARNWKPKDVYKNRSIELVQQQNVQLSLTEATEKAKQEFEKAGKDFLVETIKLGKLLRPNHLWGYYLFPDCYNHHYKKPGYNGSCFNVEIKRNDDLSWLWNESTALYPSIYLNTQQSPVAATLYVRNRVREAIRVSKIPDAKSPLPVFAYTRIVFTDQVLKFLSQDELVYTFGETVALGASGIVIWGTLSIMRSMKSCLLLDNYMETILNPYIINVTLAAKMCSQVLCQEQGVCIRKNWNSSDYLHLNPDNFAIQLEKGGKFTVRGKPTLEDLEQFSEKFYCSCYSTLSCKEKADVKDTDAVDVCIADGVCIDAFLKPPMETEEPQIFYNASPSTLSATMFIVSIL

SEQ ID NO: 107 - protein, 497 aa, Homo sapiens
  PH20 precursor 1-497
MGVLKFKHIFFRSFVKSSGVSQIVFTFLLIPCCLTLNFRAPPVIPNVPFLWAWNAPSEFCLGKFDEPLDMSLFSFIGSPRINATGQGVTIFYVDRLGYYPYIDSITGVTVNGGIPQKISLQDHLDKAKKDITFYMPVDNLGMAVIDWEEWRPTWARNWKPKDVYKNRSIELVQQQNVQLSLTEATEKAKQEFEKAGKDFLVETIKLGKLLRPNHLWGYYLFPDCYNHHYKKPGYNGSCFNVEIKRNDDLSWLWNESTALYPSIYLNTQQSPVAATLYVRNRVREAIRVSKIPDAKSPLPVFAYTRIVFTDQVLKFLSQDELVYTFGETVALGASGIVIWGTLSIMRSMKSCLLLDNYMETILNPYIINVTLAAKMCSQVLCQEQGVCIRKNWNSSDYLHLNPDNFAIQLEKGGKFTVRGKPTLEDLEQFSEKFYCSCYSTLSCKEKADVKDTDAVDVCIADGVCIDAFLKPPMETEEPQIFYNASPSTLSATMFIVS

SEQ ID NO: 108 - protein, 495 aa, Homo sapiens
  PH20 precursor 1-495
MGVLKFKHIFFRSFVKSSGVSQIVFTFLLIPCCLTLNFRAPPVIPNVPFLWAWNAPSEFCLGKFDEPLDMSLFSFIGSPRINATGQGVTIFYVDRLGYYPYIDSITGVTVNGGIPQKISLQDHLDKAKKDITFYMPVDNLGMAVIDWEEWRPTWARNWKPKDVYKNRSIELVQQQNVQLSLTEATEKAKQEFEKAGKDFLVETIKLGKLLRPNHLWGYYLFPDCYNHHYKKPGYNGSCFNVEIKRNDDLSWLWNESTALYPSIYLNTQQSPVAATLYVRNRVREAIRVSKIPDAKSPLPVFAYTRIVFTDQVLKFLSQDELVYTFGETVALGASGIVIWGTLSIMRSMKSCLLLDNYMETILNPYIINVTLAAKMCSQVLCQEQGVCIRKNWNSSDYLHLNPDNFAIQLEKGGKFTVRGKPTLEDLEQFSEKFYCSCYSTLSCKEKADVKDTDAVDVCIADGVCIDAFLKPPMETEEPQIFYNASPSTLSATMFI

SEQ ID NO: 109 - protein, 493 aa, Homo sapiens
  PH20 precursor 1-493
MGVLKFKHIFFRSFVKSSGVSQIVFTFLLIPCCLTLNFRAPPVIPNVPFLWAWNAPSEFCLGKFDEPLDMSLFSFIGSPRINATGQGVTIFYVDRLGYYPYIDSITGVTVNGGIPQKISLQDHLDKAKKDITFYMPVDNLGMAVIDWEEWRPTWARNWKPKDVYKNRSIELVQQQNVQLSLTEATEKAKQEFEKAGKDFLVETIKLGKLLRPNHLWGYYLFPDCYNHHYKKPGYNGSCFNVEIKRNDDLSWLWNESTALYPSIYLNTQQSPVAATLYVRNRVREAIRVSKIPDAKSPLPVFAYTRIVFTDQVLKFLSQDELVYTFGETVALGASGIVIWGTLSIMRSMKSCLLLDNYMETILNPYIINVTLAAKMCSQVLCQEQGVCIRKNWNSSDYLHLNPDNFAIQLEKGGKFTVRGKPTLEDLEQFSEKFYCSCYSTLSCKEKADVKDTDAVDVCIADGVCIDAFLKPPMETEEPQIFYNASPSTLSATM

SEQ ID NO: 110 - protein, 491 aa, Homo sapiens
  PH20 precursor 1-489
MGVLKFKHIFFRSFVKSSGVSQIVFTFLLIPCCLTLNFRAPPVIPNVPFLWAWNAPSEFCLGKFDEPLDMSLFSFIGSPRINATGQGVTIFYVDRLGYYPYIDSITGVTVNGGIPQKISLQDHLDKAKKDITFYMPVDNLGMAVIDWEEWRPTWARNWKPKDVYKNRSIELVQQQNVQLSLTEATEKAKQEFEKAGKDFLVETIKLGKLLRPNHLWGYYLFPDCYNHHYKKPGYNGSCFNVEIKRNDDLSWLWNESTALYPSIYLNTQQSPVAATLYVRNRVREAIRVSKIPDAKSPLPVFAYTRIVFTDQVLKFLSQDELVYTFGETVALGASGIVIWGTLSIMRSMKSCLLLDNYMETILNPYIINVTLAAKMCSQVLCQEQGVCIRKNWNSSDYLHLNPDNFAIQLEKGGKFTVRGKPTLEDLEQFSEKFYCSCYSTLSCKEKADVKDTDAVDVCIADGVCIDAFLKPPMETEEPQIFYNASPSTLSA

SEQ ID NO: 111 - protein, 489 aa, Homo sapiens
  PH20 precursor 1-489
MGVLKFKHIFFRSFVKSSGVSQIVFTFLLIPCCLTLNFRAPPVIPNVPFLWAWNAPSEFCLGKFDEPLDMSLFSFIGSPRINATGQGVTIFYVDRLGYYPYIDSITGVTVNGGIPQKISLQDHLDKAKKDITFYMPVDNLGMAVIDWEEWRPTWARNWKPKDVYKNRSIELVQQQNVQLSLTEATEKAKQEFEKAGKDFLVETIKLGKLLRPNHLWGYYLFPDCYNHHYKKPGYNGSCFNVEIKRNDDLSWLWNESTALYPSIYLNTQQSPVAATLYVRNRVREAIRVSKIPDAKSPLPVFAYTRIVFTDQVLKFLSQDELVYTFGETVALGASGIVIWGTLSIMRSMKSCLLLDNYMETILNPYIINVTLAAKMCSQVLCQEQGVCIRKNWNSSDYLHLNPDNFAIQLEKGGKFTVRGKPTLEDLEQFSEKFYCSCYSTLSCKEKADVKDTDAVDVCIADGVCIDAFLKPPMETEEPQIFYNASPSTL

SEQ ID NO: 112 - protein, 490 aa, Homo sapiens
  PH20 precursor 1-490
MGVLKFKHIFFRSFVKSSGVSQIVFTFLLIPCCLTLNFRAPPVIPNVPFLWAWNAPSEFCLGKFDEPLDMSLFSFIGSPRINATGQGVTIFYVDRLGYYPYIDSITGVTVNGGIPQKISLQDHLDKAKKDITFYMPVDNLGMAVIDWEEWRPTWARNWKPKDVYKNRSIELVQQQNVQLSLTEATEKAKQEFEKAGKDFLVETIKLGKLLRPNHLWGYYLFPDCYNHHYKKPGYNGSCFNVEIKRNDDLSWLWNESTALYPSIYLNTQQSPVAATLYVRNRVREAIRVSKIPDAKSPLPVFAYTRIVFTDQVLKFLSQDELVYTFGETVALGASGIVIWGTLSIMRSMKSCLLLDNYMETILNPYIINVTLAAKMCSQVLCQEQGVCIRKNWNSSDYLHLNPDNFAIQLEKGGKFTVRGKPTLEDLEQFSEKFYCSCYSTLSCKEKADVKDTDAVDVCIADGVCIDAFLKPPMETEEPQIFYNASPSTLS

SEQ ID NO: 113 - protein, 487 aa, Homo sapiens
  PH20 precursor 1-487
MGVLKFKHIFFRSFVKSSGVSQIVFTFLLIPCCLTLNFRAPPVIPNVPFLWAWNAPSEFCLGKFDEPLDMSLFSFIGSPRINATGQGVTIFYVDRLGYYPYIDSITGVTVNGGIPQKISLQDHLDKAKKDITFYMPVDNLGMAVIDWEEWRPTWARNWKPKDVYKNRSIELVQQQNVQLSLTEATEKAKQEFEKAGKDFLVETIKLGKLLRPNHLWGYYLFPDCYNHHYKKPGYNGSCFNVEIKRNDDLSWLWNESTALYPSIYLNTQQSPVAATLYVRNRVREAIRVSKIPDAKSPLPVFAYTRIVFTDQVLKFLSQDELVYTFGETVALGASGIVIWGTLSIMRSMKSCLLLDNYMETILNPYIINVTLAAKMCSQVLCQEQGVCIRKNWNSSDYLHLNPDNFAIQLEKGGKFTVRGKPTLEDLEQFSEKFYCSCYSTLSCKEKADVKDTDAVDVCIADGVCIDAFLKPPMETEEPQIFYNASPS

SEQ ID NO: 114 - protein, 485 aa, Homo sapiens
  PH20 precursor 1-485
MGVLKFKHIFFRSFVKSSGVSQIVFTFLLIPCCLTLNFRAPPVIPNVPFLWAWNAPSEFCLGKFDEPLDMSLFSFIGSPRINATGQGVTIFYVDRLGYYPYIDSITGVTVNGGIPQKISLQDHLDKAKKDITFYMPVDNLGMAVIDWEEWRPTWARNWKPKDVYKNRSIELVQQQNVQLSLTEATEKAKQEFEKAGKDFLVETIKLGKLLRPNHLWGYYLFPDCYNHHYKKPGYNGSCFNVEIKRNDDLSWLWNESTALYPSIYLNTQQSPVAATLYVRNRVREAIRVSKIPDAKSPLPVFAYTRIVFTDQVLKFLSQDELVYTFGETVALGASGIVIWGTLSIMRSMKSCLLLDNYMETILNPYIINVTLAAKMCSQVLCQEQGVCIRKNWNSSDYLHLNPDNFAIQLEKGGKFTVRGKPTLEDLEQFSEKFYCSCYSTLSCKEKADVKDTDAVDVCIADGVCIDAFLKPPMETEEPQIFYNAS

SEQ ID NO: 115 - protein, 484 aa, Homo sapiens
  PH20 precursor 1-484
MGVLKFKHIFFRSFVKSSGVSQIVFTFLLIPCCLTLNFRAPPVIPNVPFLWAWNAPSEFCLGKFDEPLDMSLFSFIGSPRINATGQGVTIFYVDRLGYYPYIDSITGVTVNGGIPQKISLQDHLDKAKKDITFYMPVDNLGMAVIDWEEWRPTWARNWKPKDVYKNRSIELVQQQNVQLSLTEATEKAKQEFEKAGKDFLVETIKLGKLLRPNHLWGYYLFPDCYNHHYKKPGYNGSCFNVEIKRNDDLSWLWNESTALYPSIYLNTQQSPVAATLYVRNRVREAIRVSKIPDAKSPLPVFAYTRIVFTDQVLKFLSQDELVYTFGETVALGASGIVIWGTLSIMRSMKSCLLLDNYMETILNPYIINVTLAAKMCSQVLCQEQGVCIRKNWNSSDYLHLNPDNFAIQLEKGGKFTVRGKPTLEDLEQFSEKFYCSCYSTLSCKEKADVKDTDAVDVCIADGVCIDAFLKPPMETEEPQIFYNA

SEQ ID NO: 116 - protein, 476 aa, Homo sapiens
  PH20 precursor 1-476
MGVLKFKHIFFRSFVKSSGVSQIVFTFLLIPCCLTLNFRAPPVIPNVPFLWAWNAPSEFCLGKFDEPLDMSLFSFIGSPRINATGQGVTIFYVDRLGYYPYIDSITGVTVNGGIPQKISLQDHLDKAKKDITFYMPVDNLGMAVIDWEEWRPTWARNWKPKDVYKNRSIELVQQQNVQLSLTEATEKAKQEFEKAGKDFLVETIKLGKLLRPNHLWGYYLFPDCYNHHYKKPGYNGSCFNVEIKRNDDLSWLWNESTALYPSIYLNTQQSPVAATLYVRNRVREAIRVSKIPDAKSPLPVFAYTRIVFTDQVLKFLSQDELVYTFGETVALGASGIVIWGTLSIMRSMKSCLLLDNYMETILNPYIINVTLAAKMCSQVLCQEQGVCIRKNWNSSDYLHLNPDNFAIQLEKGGKFTVRGKPTLEDLEQFSEKFYCSCYSTLSCKEKADVKDTDAVDVCIADGVCIDAFLKPPMETE

SEQ ID NO: 117 - protein, 475 aa, Homo sapiens
  PH20 precursor 1-475
MGVLKFKHIFFRSFVKSSGVSQIVFTFLLIPCCLTLNFRAPPVIPNVPFLWAWNAPSEFCLGKFDEPLDMSLFSFIGSPRINATGQGVTIFYVDRLGYYPYIDSITGVTVNGGIPQKISLQDHLDKAKKDITFYMPVDNLGMAVIDWEEWRPTWARNWKPKDVYKNRSIELVQQQNVQLSLTEATEKAKQEFEKAGKDFLVETIKLGKLLRPNHLWGYYLFPDCYNHHYKKPGYNGSCFNVEIKRNDDLSWLWNESTALYPSIYLNTQQSPVAATLYVRNRVREAIRVSKIPDAKSPLPVFAYTRIVFTDQVLKFLSQDELVYTFGETVALGASGIVIWGTLSIMRSMKSCLLLDNYMETILNPYIINVTLAAKMCSQVLCQEQGVCIRKNWNSSDYLHLNPDNFAIQLEKGGKFTVRGKPTLEDLEQFSEKFYCSCYSTLSCKEKADVKDTDAVDVCIADGVCIDAFLKPPMET

SEQ ID NO: 118 - protein, 474 aa, Homo sapiens
  PH20 precursor 1-474
MGVLKFKHIFFRSFVKSSGVSQIVFTFLLIPCCLTLNFRAPPVIPNVPFLWAWNAPSEFCLGKFDEPLDMSLFSFIGSPRINATGQGVTIFYVDRLGYYPYIDSITGVTVNGGIPQKISLQDHLDKAKKDITFYMPVDNLGMAVIDWEEWRPTWARNWKPKDVYKNRSIELVQQQNVQLSLTEATEKAKQEFEKAGKDFLVETIKLGKLLRPNHLWGYYLFPDCYNHHYKKPGYNGSCFNVEIKRNDDLSWLWNESTALYPSIYLNTQQSPVAATLYVRNRVREAIRVSKIPDAKSPLPVFAYTRIVFTDQVLKFLSQDELVYTFGETVALGASGIVIWGTLSIMRSMKSCLLLDNYMETILNPYIINVTLAAKMCSQVLCQEQGVCIRKNWNSSDYLHLNPDNFAIQLEKGGKFTVRGKPTLEDLEQFSEKFYCSCYSTLSCKEKADVKDTDAVDVCIADGVCIDAFLKPPME

SEQ ID NO: 119 - protein, 473 aa, Homo sapiens
  PH20 precursor 1-473
MGVLKFKHIFFRSFVKSSGVSQIVFTFLLIPCCLTLNFRAPPVIPNVPFLWAWNAPSEFCLGKFDEPLDMSLFSFIGSPRINATGQGVTIFYVDRLGYYPYIDSITGVTVNGGIPQKISLQDHLDKAKKDITFYMPVDNLGMAVIDWEEWRPTWARNWKPKDVYKNRSIELVQQQNVQLSLTEATEKAKQEFEKAGKDFLVETIKLGKLLRPNHLWGYYLFPDCYNHHYKKPGYNGSCFNVEIKRNDDLSWLWNESTALYPSIYLNTQQSPVAATLYVRNRVREAIRVSKIPDAKSPLPVFAYTRIVFTDQVLKFLSQDELVYTFGETVALGASGIVIWGTLSIMRSMKSCLLLDNYMETILNPYIINVTLAAKMCSQVLCQEQGVCIRKNWNSSDYLHLNPDNFAIQLEKGGKFTVRGKPTLEDLEQFSEKFYCSCYSTLSCKEKADVKDTDAVDVCIADGVCIDAFLKPPM

SEQ ID NO: 120 - protein, 472 aa, Homo sapiens
  PH20 precursor 1-472
MGVLKFKHIFFRSFVKSSGVSQIVFTFLLIPCCLTLNFRAPPVIPNVPFLWAWNAPSEFCLGKFDEPLDMSLFSFIGSPRINATGQGVTIFYVDRLGYYPYIDSITGVTVNGGIPQKISLQDHLDKAKKDITFYMPVDNLGMAVIDWEEWRPTWARNWKPKDVYKNRSIELVQQQNVQLSLTEATEKAKQEFEKAGKDFLVETIKLGKLLRPNHLWGYYLFPDCYNHHYKKPGYNGSCFNVEIKRNDDLSWLWNESTALYPSIYLNTQQSPVAATLYVRNRVREAIRVSKIPDAKSPLPVFAYTRIVFTDQVLKFLSQDELVYTFGETVALGASGIVIWGTLSIMRSMKSCLLLDNYMETILNPYIINVTLAAKMCSQVLCQEQGVCIRKNWNSSDYLHLNPDNFAIQLEKGGKFTVRGKPTLEDLEQFSEKFYCSCYSTLSCKEKADVKDTDAVDVCIADGVCIDAFLKPP

SEQ ID NO: 121 - protein, 471 aa, Homo sapiens
  PH20 precursor 1-471
MGVLKFKHIFFRSFVKSSGVSQIVFTFLLIPCCLTLNFRAPPVIPNVPFLWAWNAPSEFCLGKFDEPLDMSLFSFIGSPRINATGQGVTIFYVDRLGYYPYIDSITGVTVNGGIPQKISLQDHLDKAKKDITFYMPVDNLGMAVIDWEEWRPTWARNWKPKDVYKNRSIELVQQQNVQLSLTEATEKAKQEFEKAGKDFLVETIKLGKLLRPNHLWGYYLFPDCYNHHYKKPGYNGSCFNVEIKRNDDLSWLWNESTALYPSIYLNTQQSPVAATLYVRNRVREAIRVSKIPDAKSPLPVFAYTRIVFTDQVLKFLSQDELVYTFGETVALGASGIVIWGTLSIMRSMKSCLLLDNYMETILNPYIINVTLAAKMCSQVLCQEQGVCIRKNWNSSDYLHLNPDNFAIQLEKGGKFTVRGKPTLEDLEQFSEKFYCSCYSTLSCKEKADVKDTDAVDVCIADGVCIDAFLKP

SEQ ID NO: 122 - protein, 470 aa, Homo sapiens
  PH20 precursor 1-470
MGVLKFKHIFFRSFVKSSGVSQIVFTFLLIPCCLTLNFRAPPVIPNVPFLWAWNAPSEFCLGKFDEPLDMSLFSFIGSPRINATGQGVTIFYVDRLGYYPYIDSITGVTVNGGIPQKISLQDHLDKAKKDITFYMPVDNLGMAVIDWEEWRPTWARNWKPKDVYKNRSIELVQQQNVQLSLTEATEKAKQEFEKAGKDFLVETIKLGKLLRPNHLWGYYLFPDCYNHHYKKPGYNGSCFNVEIKRNDDLSWLWNESTALYPSIYLNTQQSPVAATLYVRNRVREAIRVSKIPDAKSPLPVFAYTRIVFTDQVLKFLSQDELVYTFGETVALGASGIVIWGTLSIMRSMKSCLLLDNYMETILNPYIINVTLAAKMCSQVLCQEQGVCIRKNWNSSDYLHLNPDNFAIQLEKGGKFTVRGKPTLEDLEQFSEKFYCSCYSTLSCKEKADVKDTDAVDVCIADGVCIDAFLK

SEQ ID NO: 123 - protein, 469 aa, Homo sapiens
  PH20 precursor 1-469
MGVLKFKHIFFRSFVKSSGVSQIVFTFLLIPCCLTLNFRAPPVIPNVPFLWAWNAPSEFCLGKFDEPLDMSLFSFIGSPRINATGQGVTIFYVDRLGYYPYIDSITGVTVNGGIPQKISLQDHLDKAKKDITFYMPVDNLGMAVIDWEEWRPTWARNWKPKDVYKNRSIELVQQQNVQLSLTEATEKAKQEFEKAGKDFLVETIKLGKLLRPNHLWGYYLFPDCYNHHYKKPGYNGSCFNVEIKRNDDLSWLWNESTALYPSIYLNTQQSPVAATLYVRNRVREAIRVSKIPDAKSPLPVFAYTRIVFTDQVLKFLSQDELVYTFGETVALGASGIVIWGTLSIMRSMKSCLLLDNYMETILNPYIINVTLAAKMCSQVLCQEQGVCIRKNWNSSDYLHLNPDNFAIQLEKGGKFTVRGKPTLEDLEQFSEKFYCSCYSTLSCKEKADVKDTDAVDVCIADGVCIDAFL

SEQ ID NO: 124 - protein, 468 aa, Homo sapiens
  PH20 precursor 1-468
MGVLKFKHIFFRSFVKSSGVSQIVFTFLLIPCCLTLNFRAPPVIPNVPFLWAWNAPSEFCLGKFDEPLDMSLFSFIGSPRINATGQGVTIFYVDRLGYYPYIDSITGVTVNGGIPQKISLQDHLDKAKKDITFYMPVDNLGMAVIDWEEWRPTWARNWKPKDVYKNRSIELVQQQNVQLSLTEATEKAKQEFEKAGKDFLVETIKLGKLLRPNHLWGYYLFPDCYNHHYKKPGYNGSCFNVEIKRNDDLSWLWNESTALYPSIYLNTQQSPVAATLYVRNRVREAIRVSKIPDAKSPLPVFAYTRIVFTDQVLKFLSQDELVYTFGETVALGASGIVIWGTLSIMRSMKSCLLLDNYMETILNPYIINVTLAAKMCSQVLCQEQGVCIRKNWNSSDYLHLNPDNFAIQLEKGGKFTVRGKPTLEDLEQFSEKFYCSCYSTLSCKEKADVKDTDAVDVCIADGVCIDAF

SEQ ID NO: 125 - protein, 466 aa, Homo sapiens
  PH20 precursor 1-466
MGVLKFKHIFFRSFVKSSGVSQIVFTFLLIPCCLTLNFRAPPVIPNVPFLWAWNAPSEFCLGKFDEPLDMSLFSFIGSPRINATGQGVTIFYVDRLGYYPYIDSITGVTVNGGIPQKISLQDHLDKAKKDITFYMPVDNLGMAVIDWEEWRPTWARNWKPKDVYKNRSIELVQQQNVQLSLTEATEKAKQEFEKAGKDFLVETIKLGKLLRPNHLWGYYLFPDCYNHHYKKPGYNGSCFNVEIKRNDDLSWLWNESTALYPSIYLNTQQSPVAATLYVRNRVREAIRVSKIPDAKSPLPVFAYTRIVFTDQVLKFLSQDELVYTFGETVALGASGIVIWGTLSIMRSMKSCLLLDNYMETILNPYIINVTLAAKMCSQVLCQEQGVCIRKNWNSSDYLHLNPDNFAIQLEKGGKFTVRGKPTLEDLEQFSEKFYCSCYSTLSCKEKADVKDTDAVDVCIADGVCID

SEQ ID NO: 126 - protein, 465 aa, Homo sapiens
  PH20 precursor 1-465
MGVLKFKHIFFRSFVKSSGVSQIVFTFLLIPCCLTLNFRAPPVIPNVPFLWAWNAPSEFCLGKFDEPLDMSLFSFIGSPRINATGQGVTIFYVDRLGYYPYIDSITGVTVNGGIPQKISLQDHLDKAKKDITFYMPVDNLGMAVIDWEEWRPTWARNWKPKDVYKNRSIELVQQQNVQLSLTEATEKAKQEFEKAGKDFLVETIKLGKLLRPNHLWGYYLFPDCYNHHYKKPGYNGSCFNVEIKRNDDLSWLWNESTALYPSIYLNTQQSPVAATLYVRNRVREAIRVSKIPDAKSPLPVFAYTRIVFTDQVLKFLSQDELVYTFGETVALGASGIVIWGTLSIMRSMKSCLLLDNYMETILNPYIINVTLAAKMCSQVLCQEQGVCIRKNWNSSDYLHLNPDNFAIQLEKGGKFTVRGKPTLEDLEQFSEKFYCSCYSTLSCKEKADVKDTDAVDVCIADGVCI

SEQ ID NO: 127 - protein, 464 aa, Homo sapiens
  PH20 precursor 1-464
MGVLKFKHIFFRSFVKSSGVSQIVFTFLLIPCCLTLNFRAPPVIPNVPFLWAWNAPSEFCLGKFDEPLDMSLFSFIGSPRINATGQGVTIFYVDRLGYYPYIDSITGVTVNGGIPQKISLQDHLDKAKKDITFYMPVDNLGMAVIDWEEWRPTWARNWKPKDVYKNRSIELVQQQNVQLSLTEATEKAKQEFEKAGKDFLVETIKLGKLLRPNHLWGYYLFPDCYNHHYKKPGYNGSCFNVEIKRNDDLSWLWNESTALYPSIYLNTQQSPVAATLYVRNRVREAIRVSKIPDAKSPLPVFAYTRIVFTDQVLKFLSQDELVYTFGETVALGASGIVIWGTLSIMRSMKSCLLLDNYMETILNPYIINVTLAAKMCSQVLCQEQGVCIRKNWNSSDYLHLNPDNFAIQLEKGGKFTVRGKPTLEDLEQFSEKFYCSCYSTLSCKEKADVKDTDAVDVCIADGVC

SEQ ID NO: 128 - protein, 462 aa, Homo sapiens
  PH20 precursor 1-462
MGVLKFKHIFFRSFVKSSGVSQIVFTFLLIPCCLTLNFRAPPVIPNVPFLWAWNAPSEFCLGKFDEPLDMSLFSFIGSPRINATGQGVTIFYVDRLGYYPYIDSITGVTVNGGIPQKISLQDHLDKAKKDITFYMPVDNLGMAVIDWEEWRPTWARNWKPKDVYKNRSIELVQQQNVQLSLTEATEKAKQEFEKAGKDFLVETIKLGKLLRPNHLWGYYLFPDCYNHHYKKPGYNGSCFNVEIKRNDDLSWLWNESTALYPSIYLNTQQSPVAATLYVRNRVREAIRVSKIPDAKSPLPVFAYTRIVFTDQVLKFLSQDELVYTFGETVALGASGIVIWGTLSIMRSMKSCLLLDNYMETILNPYIINVTLAAKMCSQVLCQEQGVCIRKNWNSSDYLHLNPDNFAIQLEKGGKFTVRGKPTLEDLEQFSEKFYCSCYSTLSCKEKADVKDTDAVDVCIADG

SEQ ID NO: 129 - protein, 460 aa, Homo sapiens
  PH20 precursor 1-460
MGVLKFKHIFFRSFVKSSGVSQIVFTFLLIPCCLTLNFRAPPVIPNVPFLWAWNAPSEFCLGKFDEPLDMSLFSFIGSPRINATGQGVTIFYVDRLGYYPYIDSITGVTVNGGIPQKISLQDHLDKAKKDITFYMPVDNLGMAVIDWEEWRPTWARNWKPKDVYKNRSIELVQQQNVQLSLTEATEKAKQEFEKAGKDFLVETIKLGKLLRPNHLWGYYLFPDCYNHHYKKPGYNGSCFNVEIKRNDDLSWLWNESTALYPSIYLNTQQSPVAATLYVRNRVREAIRVSKIPDAKSPLPVFAYTRIVFTDQVLKFLSQDELVYTFGETVALGASGIVIWGTLSIMRSMKSCLLLDNYMETILNPYIINVTLAAKMCSQVLCQEQGVCIRKNWNSSDYLHLNPDNFAIQLEKGGKFTVRGKPTLEDLEQFSEKFYCSCYSTLSCKEKADVKDTDAVDVCIA

SEQ ID NO: 130 - protein, 458 aa, Homo sapiens
  PH20 precursor 1-458
MGVLKFKHIFFRSFVKSSGVSQIVFTFLLIPCCLTLNFRAPPVIPNVPFLWAWNAPSEFCLGKFDEPLDMSLFSFIGSPRINATGQGVTIFYVDRLGYYPYIDSITGVTVNGGIPQKISLQDHLDKAKKDITFYMPVDNLGMAVIDWEEWRPTWARNWKPKDVYKNRSIELVQQQNVQLSLTEATEKAKQEFEKAGKDFLVETIKLGKLLRPNHLWGYYLFPDCYNHHYKKPGYNGSCFNVEIKRNDDLSWLWNESTALYPSIYLNTQQSPVAATLYVRNRVREAIRVSKIPDAKSPLPVFAYTRIVFTDQVLKFLSQDELVYTFGETVALGASGIVIWGTLSIMRSMKSCLLLDNYMETILNPYIINVTLAAKMCSQVLCQEQGVCIRKNWNSSDYLHLNPDNFAIQLEKGGKFTVRGKPTLEDLEQFSEKFYCSCYSTLSCKEKADVKDTDAVDVC

SEQ ID NO: 131 - protein, 456 aa, Homo sapiens
  PH20 precursor 1-456
MGVLKFKHIFFRSFVKSSGVSQIVFTFLLIPCCLTLNFRAPPVIPNVPFLWAWNAPSEFCLGKFDEPLDMSLFSFIGSPRINATGQGVTIFYVDRLGYYPYIDSITGVTVNGGIPQKISLQDHLDKAKKDITFYMPVDNLGMAVIDWEEWRPTWARNWKPKDVYKNRSIELVQQQNVQLSLTEATEKAKQEFEKAGKDFLVETIKLGKLLRPNHLWGYYLFPDCYNHHYKKPGYNGSCFNVEIKRNDDLSWLWNESTALYPSIYLNTQQSPVAATLYVRNRVREAIRVSKIPDAKSPLPVFAYTRIVFTDQVLKFLSQDELVYTFGETVALGASGIVIWGTLSIMRSMKSCLLLDNYMETILNPYIINVTLAAKMCSQVLCQEQGVCIRKNWNSSDYLHLNPDNFAIQLEKGGKFTVRGKPTLEDLEQFSEKFYCSCYSTLSCKEKADVKDTDAVD

SEQ ID NO: 132 - protein, 454 aa, Homo sapiens
  PH20 precursor 1-454
MGVLKFKHIFFRSFVKSSGVSQIVFTFLLIPCCLTLNFRAPPVIPNVPFLWAWNAPSEFCLGKFDEPLDMSLFSFIGSPRINATGQGVTIFYVDRLGYYPYIDSITGVTVNGGIPQKISLQDHLDKAKKDITFYMPVDNLGMAVIDWEEWRPTWARNWKPKDVYKNRSIELVQQQNVQLSLTEATEKAKQEFEKAGKDFLVETIKLGKLLRPNHLWGYYLFPDCYNHHYKKPGYNGSCFNVEIKRNDDLSWLWNESTALYPSIYLNTQQSPVAATLYVRNRVREAIRVSKIPDAKSPLPVFAYTRIVFTDQVLKFLSQDELVYTFGETVALGASGIVIWGTLSIMRSMKSCLLLDNYMETILNPYIINVTLAAKMCSQVLCQEQGVCIRKNWNSSDYLHLNPDNFAIQLEKGGKFTVRGKPTLEDLEQFSEKFYCSCYSTLSCKEKADVKDTDA

SEQ ID NO: 133 - protein, 452 aa, Homo sapiens
  PH20 precursor 1-452
MGVLKFKHIFFRSFVKSSGVSQIVFTFLLIPCCLTLNFRAPPVIPNVPFLWAWNAPSEFCLGKFDEPLDMSLFSFIGSPRINATGQGVTIFYVDRLGYYPYIDSITGVTVNGGIPQKISLQDHLDKAKKDITFYMPVDNLGMAVIDWEEWRPTWARNWKPKDVYKNRSIELVQQQNVQLSLTEATEKAKQEFEKAGKDFLVETIKLGKLLRPNHLWGYYLFPDCYNHHYKKPGYNGSCFNVEIKRNDDLSWLWNESTALYPSIYLNTQQSPVAATLYVRNRVREAIRVSKIPDAKSPLPVFAYTRIVFTDQVLKFLSQDELVYTFGETVALGASGIVIWGTLSIMRSMKSCLLLDNYMETILNPYIINVTLAAKMCSQVLCQEQGVCIRKNWNSSDYLHLNPDNFAIQLEKGGKFTVRGKPTLEDLEQFSEKFYCSCYSTLSCKEKADVKDT

SEQ ID NO: 134 - protein, 450 aa, Homo sapiens
  PH20 precursor 1-450
MGVLKFKHIFFRSFVKSSGVSQIVFTFLLIPCCLTLNFRAPPVIPNVPFLWAWNAPSEFCLGKFDEPLDMSLFSFIGSPRINATGQGVTIFYVDRLGYYPYIDSITGVTVNGGIPQKISLQDHLDKAKKDITFYMPVDNLGMAVIDWEEWRPTWARNWKPKDVYKNRSIELVQQQNVQLSLTEATEKAKQEFEKAGKDFLVETIKLGKLLRPNHLWGYYLFPDCYNHHYKKPGYNGSCFNVEIKRNDDLSWLWNESTALYPSIYLNTQQSPVAATLYVRNRVREAIRVSKIPDAKSPLPVFAYTRIVFTDQVLKFLSQDELVYTFGETVALGASGIVIWGTLSIMRSMKSCLLLDNYMETILNPYIINVTLAAKMCSQVLCQEQGVCIRKNWNSSDYLHLNPDNFAIQLEKGGKFTVRGKPTLEDLEQFSEKFYCSCYSTLSCKEKADVK

SEQ ID NO: 135 - protein, 508 aa, Homo sapiens
  PH20 precursor 1-508
MGVLKFKHIFFRSFVKSSGVSQIVFTFLLIPCCLTLNFRAPPVIPNVPFLWAWNAPSEFCLGKFDEPLDMSLFSFIGSPRINATGQGVTIFYVDRLGYYPYIDSITGVTVNGGIPQKISLQDHLDKAKKDITFYMPVDNLGMAVIDWEEWRPTWARNWKPKDVYKNRSIELVQQQNVQLSLTEATEKAKQEFEKAGKDFLVETIKLGKLLRPNHLWGYYLFPDCYNHHYKKPGYNGSCFNVEIKRNDDLSWLWNESTALYPSIYLNTQQSPVAATLYVRNRVREAIRVSKIPDAKSPLPVFAYTRIVFTDQVLKFLSQDELVYTFGETVALGASGIVIWGTLSIMRSMKSCLLLDNYMETILNPYIINVTLAAKMCSQVLCQEQGVCIRKNWNSSDYLHLNPDNFAIQLEKGGKFTVRGKPTLEDLEQFSEKFYCSCYSTLSCKEKADVKDTDAVDVCIADGVCIDAFLKPPMETEEPQIFYNASPSTLSATMFIVSILFLIISSVAS

SEQ ID NO: 136 - protein, 506 aa, Homo sapiens
  PH20 precursor 1-506
MGVLKFKHIFFRSFVKSSGVSQIVFTFLLIPCCLTLNFRAPPVIPNVPFLWAWNAPSEFCLGKFDEPLDMSLFSFIGSPRINATGQGVTIFYVDRLGYYPYIDSITGVTVNGGIPQKISLQDHLDKAKKDITFYMPVDNLGMAVIDWEEWRPTWARNWKPKDVYKNRSIELVQQQNVQLSLTEATEKAKQEFEKAGKDFLVETIKLGKLLRPNHLWGYYLFPDCYNHHYKKPGYNGSCFNVEIKRNDDLSWLWNESTALYPSIYLNTQQSPVAATLYVRNRVREAIRVSKIPDAKSPLPVFAYTRIVFTDQVLKFLSQDELVYTFGETVALGASGIVIWGTLSIMRSMKSCLLLDNYMETILNPYIINVTLAAKMCSQVLCQEQGVCIRKNWNSSDYLHLNPDNFAIQLEKGGKFTVRGKPTLEDLEQFSEKFYCSCYSTLSCKEKADVKDTDAVDVCIADGVCIDAFLKPPMETEEPQIFYNASPSTLSATMFIVSILFLIISSV

SEQ ID NO: 137 - protein, 504 aa, Homo sapiens
  PH20 precursor 1-504
MGVLKFKHIFFRSFVKSSGVSQIVFTFLLIPCCLTLNFRAPPVIPNVPFLWAWNAPSEFCLGKFDEPLDMSLFSFIGSPRINATGQGVTIFYVDRLGYYPYIDSITGVTVNGGIPQKISLQDHLDKAKKDITFYMPVDNLGMAVIDWEEWRPTWARNWKPKDVYKNRSIELVQQQNVQLSLTEATEKAKQEFEKAGKDFLVETIKLGKLLRPNHLWGYYLFPDCYNHHYKKPGYNGSCFNVEIKRNDDLSWLWNESTALYPSIYLNTQQSPVAATLYVRNRVREAIRVSKIPDAKSPLPVFAYTRIVFTDQVLKFLSQDELVYTFGETVALGASGIVIWGTLSIMRSMKSCLLLDNYMETILNPYIINVTLAAKMCSQVLCQEQGVCIRKNWNSSDYLHLNPDNFAIQLEKGGKFTVRGKPTLEDLEQFSEKFYCSCYSTLSCKEKADVKDTDAVDVCIADGVCIDAFLKPPMETEEPQIFYNASPSTLSATMFIVSILFLIIS

SEQ ID NO: 138 - protein, 502 aa, Homo sapiens
  PH20 precursor 1-502
MGVLKFKHIFFRSFVKSSGVSQIVFTFLLIPCCLTLNFRAPPVIPNVPFLWAWNAPSEFCLGKFDEPLDMSLFSFIGSPRINATGQGVTIFYVDRLGYYPYIDSITGVTVNGGIPQKISLQDHLDKAKKDITFYMPVDNLGMAVIDWEEWRPTWARNWKPKDVYKNRSIELVQQQNVQLSLTEATEKAKQEFEKAGKDFLVETIKLGKLLRPNHLWGYYLFPDCYNHHYKKPGYNGSCFNVEIKRNDDLSWLWNESTALYPSIYLNTQQSPVAATLYVRNRVREAIRVSKIPDAKSPLPVFAYTRIVFTDQVLKFLSQDELVYTFGETVALGASGIVIWGTLSIMRSMKSCLLLDNYMETILNPYIINVTLAAKMCSQVLCQEQGVCIRKNWNSSDYLHLNPDNFAIQLEKGGKFTVRGKPTLEDLEQFSEKFYCSCYSTLSCKEKADVKDTDAVDVCIADGVCIDAFLKPPMETEEPQIFYNASPSTLSATMFIVSILFLI

SEQ ID NO: 139 - protein, 500 aa, Homo sapiens
  PH20 precursor 1-500
MGVLKFKHIFFRSFVKSSGVSQIVFTFLLIPCCLTLNFRAPPVIPNVPFLWAWNAPSEFCLGKFDEPLDMSLFSFIGSPRINATGQGVTIFYVDRLGYYPYIDSITGVTVNGGIPQKISLQDHLDKAKKDITFYMPVDNLGMAVIDWEEWRPTWARNWKPKDVYKNRSIELVQQQNVQLSLTEATEKAKQEFEKAGKDFLVETIKLGKLLRPNHLWGYYLFPDCYNHHYKKPGYNGSCFNVEIKRNDDLSWLWNESTALYPSIYLNTQQSPVAATLYVRNRVREAIRVSKIPDAKSPLPVFAYTRIVFTDQVLKFLSQDELVYTFGETVALGASGIVIWGTLSIMRSMKSCLLLDNYMETILNPYIINVTLAAKMCSQVLCQEQGVCIRKNWNSSDYLHLNPDNFAIQLEKGGKFTVRGKPTLEDLEQFSEKFYCSCYSTLSCKEKADVKDTDAVDVCIADGVCIDAFLKPPMETEEPQIFYNASPSTLSATMFIVSILF

SEQ ID NO: 140 - protein, 498 aa, Homo sapiens
  PH20 precursor 1-498
MGVLKFKHIFFRSFVKSSGVSQIVFTFLLIPCCLTLNFRAPPVIPNVPFLWAWNAPSEFCLGKFDEPLDMSLFSFIGSPRINATGQGVTIFYVDRLGYYPYIDSITGVTVNGGIPQKISLQDHLDKAKKDITFYMPVDNLGMAVIDWEEWRPTWARNWKPKDVYKNRSIELVQQQNVQLSLTEATEKAKQEFEKAGKDFLVETIKLGKLLRPNHLWGYYLFPDCYNHHYKKPGYNGSCFNVEIKRNDDLSWLWNESTALYPSIYLNTQQSPVAATLYVRNRVREAIRVSKIPDAKSPLPVFAYTRIVFTDQVLKFLSQDELVYTFGETVALGASGIVIWGTLSIMRSMKSCLLLDNYMETILNPYIINVTLAAKMCSQVLCQEQGVCIRKNWNSSDYLHLNPDNFAIQLEKGGKFTVRGKPTLEDLEQFSEKFYCSCYSTLSCKEKADVKDTDAVDVCIADGVCIDAFLKPPMETEEPQIFYNASPSTLSATMFIVSI

SEQ ID NO: 141 - protein, 496 aa, Homo sapiens
  PH20 precursor 1-496
MGVLKFKHIFFRSFVKSSGVSQIVFTFLLIPCCLTLNFRAPPVIPNVPFLWAWNAPSEFCLGKFDEPLDMSLFSFIGSPRINATGQGVTIFYVDRLGYYPYIDSITGVTVNGGIPQKISLQDHLDKAKKDITFYMPVDNLGMAVIDWEEWRPTWARNWKPKDVYKNRSIELVQQQNVQLSLTEATEKAKQEFEKAGKDFLVETIKLGKLLRPNHLWGYYLFPDCYNHHYKKPGYNGSCFNVEIKRNDDLSWLWNESTALYPSIYLNTQQSPVAATLYVRNRVREAIRVSKIPDAKSPLPVFAYTRIVFTDQVLKFLSQDELVYTFGETVALGASGIVIWGTLSIMRSMKSCLLLDNYMETILNPYIINVTLAAKMCSQVLCQEQGVCIRKNWNSSDYLHLNPDNFAIQLEKGGKFTVRGKPTLEDLEQFSEKFYCSCYSTLSCKEKADVKDTDAVDVCIADGVCIDAFLKPPMETEEPQIFYNASPSTLSATMFIV

SEQ ID NO: 142 - protein, 494 aa, Homo sapiens
  PH20 precursor 1-494
MGVLKFKHIFFRSFVKSSGVSQIVFTFLLIPCCLTLNFRAPPVIPNVPFLWAWNAPSEFCLGKFDEPLDMSLFSFIGSPRINATGQGVTIFYVDRLGYYPYIDSITGVTVNGGIPQKISLQDHLDKAKKDITFYMPVDNLGMAVIDWEEWRPTWARNWKPKDVYKNRSIELVQQQNVQLSLTEATEKAKQEFEKAGKDFLVETIKLGKLLRPNHLWGYYLFPDCYNHHYKKPGYNGSCFNVEIKRNDDLSWLWNESTALYPSIYLNTQQSPVAATLYVRNRVREAIRVSKIPDAKSPLPVFAYTRIVFTDQVLKFLSQDELVYTFGETVALGASGIVIWGTLSIMRSMKSCLLLDNYMETILNPYIINVTLAAKMCSQVLCQEQGVCIRKNWNSSDYLHLNPDNFAIQLEKGGKFTVRGKPTLEDLEQFSEKFYCSCYSTLSCKEKADVKDTDAVDVCIADGVCIDAFLKPPMETEEPQIFYNASPSTLSATMF

SEQ ID NO: 143 - protein, 492 aa, Homo sapiens
  PH20 precursor 1-492
MGVLKFKHIFFRSFVKSSGVSQIVFTFLLIPCCLTLNFRAPPVIPNVPFLWAWNAPSEFCLGKFDEPLDMSLFSFIGSPRINATGQGVTIFYVDRLGYYPYIDSITGVTVNGGIPQKISLQDHLDKAKKDITFYMPVDNLGMAVIDWEEWRPTWARNWKPKDVYKNRSIELVQQQNVQLSLTEATEKAKQEFEKAGKDFLVETIKLGKLLRPNHLWGYYLFPDCYNHHYKKPGYNGSCFNVEIKRNDDLSWLWNESTALYPSIYLNTQQSPVAATLYVRNRVREAIRVSKIPDAKSPLPVFAYTRIVFTDQVLKFLSQDELVYTFGETVALGASGIVIWGTLSIMRSMKSCLLLDNYMETILNPYIINVTLAAKMCSQVLCQEQGVCIRKNWNSSDYLHLNPDNFAIQLEKGGKFTVRGKPTLEDLEQFSEKFYCSCYSTLSCKEKADVKDTDAVDVCIADGVCIDAFLKPPMETEEPQIFYNASPSTLSAT

SEQ ID NO: 144 - protein, 488 aa, Homo sapiens
  PH20 precursor 1-488
MGVLKFKHIFFRSFVKSSGVSQIVFTFLLIPCCLTLNFRAPPVIPNVPFLWAWNAPSEFCLGKFDEPLDMSLFSFIGSPRINATGQGVTIFYVDRLGYYPYIDSITGVTVNGGIPQKISLQDHLDKAKKDITFYMPVDNLGMAVIDWEEWRPTWARNWKPKDVYKNRSIELVQQQNVQLSLTEATEKAKQEFEKAGKDFLVETIKLGKLLRPNHLWGYYLFPDCYNHHYKKPGYNGSCFNVEIKRNDDLSWLWNESTALYPSIYLNTQQSPVAATLYVRNRVREAIRVSKIPDAKSPLPVFAYTRIVFTDQVLKFLSQDELVYTFGETVALGASGIVIWGTLSIMRSMKSCLLLDNYMETILNPYIINVTLAAKMCSQVLCQEQGVCIRKNWNSSDYLHLNPDNFAIQLEKGGKFTVRGKPTLEDLEQFSEKFYCSCYSTLSCKEKADVKDTDAVDVCIADGVCIDAFLKPPMETEEPQIFYNASPST

SEQ ID NO: 145 - protein, 486 aa, Homo sapiens
  PH20 precursor 1-486
MGVLKFKHIFFRSFVKSSGVSQIVFTFLLIPCCLTLNFRAPPVIPNVPFLWAWNAPSEFCLGKFDEPLDMSLFSFIGSPRINATGQGVTIFYVDRLGYYPYIDSITGVTVNGGIPQKISLQDHLDKAKKDITFYMPVDNLGMAVIDWEEWRPTWARNWKPKDVYKNRSIELVQQQNVQLSLTEATEKAKQEFEKAGKDFLVETIKLGKLLRPNHLWGYYLFPDCYNHHYKKPGYNGSCFNVEIKRNDDLSWLWNESTALYPSIYLNTQQSPVAATLYVRNRVREAIRVSKIPDAKSPLPVFAYTRIVFTDQVLKFLSQDELVYTFGETVALGASGIVIWGTLSIMRSMKSCLLLDNYMETILNPYIINVTLAAKMCSQVLCQEQGVCIRKNWNSSDYLHLNPDNFAIQLEKGGKFTVRGKPTLEDLEQFSEKFYCSCYSTLSCKEKADVKDTDAVDVCIADGVCIDAFLKPPMETEEPQIFYNASP

SEQ ID NO: 146 - protein, 472 aa, Homo sapiens
  mature PH20 36-507
LNFRAPPVIPNVPFLWAWNAPSEFCLGKFDEPLDMSLFSFIGSPRINATGQGVTIFYVDRLGYYPYIDSITGVTVNGGIPQKISLQDHLDKAKKDITFYMPVDNLGMAVIDWEEWRPTWARNWKPKDVYKNRSIELVQQQNVQLSLTEATEKAKQEFEKAGKDFLVETIKLGKLLRPNHLWGYYLFPDCYNHHYKKPGYNGSCFNVEIKRNDDLSWLWNESTALYPSIYLNTQQSPVAATLYVRNRVREAIRVSKIPDAKSPLPVFAYTRIVFTDQVLKFLSQDELVYTFGETVALGASGIVIWGTLSIMRSMKSCLLLDNYMETILNPYIINVTLAAKMCSQVLCQEQGVCIRKNWNSSDYLHLNPDNFAIQLEKGGKFTVRGKPTLEDLEQFSEKFYCSCYSTLSCKEKADVKDTDAVDVCIADGVCIDAFLKPPMETEEPQIFYNASPSTLSATMFIVSILFLIISSVA

SEQ ID NO: 147 - protein, 470 aa, Homo sapiens
  mature PH20 36-505
LNFRAPPVIPNVPFLWAWNAPSEFCLGKFDEPLDMSLFSFIGSPRINATGQGVTIFYVDRLGYYPYIDSITGVTVNGGIPQKISLQDHLDKAKKDITFYMPVDNLGMAVIDWEEWRPTWARNWKPKDVYKNRSIELVQQQNVQLSLTEATEKAKQEFEKAGKDFLVETIKLGKLLRPNHLWGYYLFPDCYNHHYKKPGYNGSCFNVEIKRNDDLSWLWNESTALYPSIYLNTQQSPVAATLYVRNRVREAIRVSKIPDAKSPLPVFAYTRIVFTDQVLKFLSQDELVYTFGETVALGASGIVIWGTLSIMRSMKSCLLLDNYMETILNPYIINVTLAAKMCSQVLCQEQGVCIRKNWNSSDYLHLNPDNFAIQLEKGGKFTVRGKPTLEDLEQFSEKFYCSCYSTLSCKEKADVKDTDAVDVCIADGVCIDAFLKPPMETEEPQIFYNASPSTLSATMFIVSILFLIISS

SEQ ID NO: 148 - protein, 468 aa, Homo sapiens
  mature PH20 36-503
LNFRAPPVIPNVPFLWAWNAPSEFCLGKFDEPLDMSLFSFIGSPRINATGQGVTIFYVDRLGYYPYIDSITGVTVNGGIPQKISLQDHLDKAKKDITFYMPVDNLGMAVIDWEEWRPTWARNWKPKDVYKNRSIELVQQQNVQLSLTEATEKAKQEFEKAGKDFLVETIKLGKLLRPNHLWGYYLFPDCYNHHYKKPGYNGSCFNVEIKRNDDLSWLWNESTALYPSIYLNTQQSPVAATLYVRNRVREAIRVSKIPDAKSPLPVFAYTRIVFTDQVLKFLSQDELVYTFGETVALGASGIVIWGTLSIMRSMKSCLLLDNYMETILNPYIINVTLAAKMCSQVLCQEQGVCIRKNWNSSDYLHLNPDNFAIQLEKGGKFTVRGKPTLEDLEQFSEKFYCSCYSTLSCKEKADVKDTDAVDVCIADGVCIDAFLKPPMETEEPQIFYNASPSTLSATMFIVSILFLII

SEQ ID NO: 149 - protein, 466 aa, Homo sapiens
  mature PH20 36-501
LNFRAPPVIPNVPFLWAWNAPSEFCLGKFDEPLDMSLFSFIGSPRINATGQGVTIFYVDRLGYYPYIDSITGVTVNGGIPQKISLQDHLDKAKKDITFYMPVDNLGMAVIDWEEWRPTWARNWKPKDVYKNRSIELVQQQNVQLSLTEATEKAKQEFEKAGKDFLVETIKLGKLLRPNHLWGYYLFPDCYNHHYKKPGYNGSCFNVEIKRNDDLSWLWNESTALYPSIYLNTQQSPVAATLYVRNRVREAIRVSKIPDAKSPLPVFAYTRIVFTDQVLKFLSQDELVYTFGETVALGASGIVIWGTLSIMRSMKSCLLLDNYMETILNPYIINVTLAAKMCSQVLCQEQGVCIRKNWNSSDYLHLNPDNFAIQLEKGGKFTVRGKPTLEDLEQFSEKFYCSCYSTLSCKEKADVKDTDAVDVCIADGVCIDAFLKPPMETEEPQIFYNASPSTLSATMFIVSILFL

SEQ ID NO: 150 - protein, 464 aa, Homo sapiens
  mature PH20 36-499
LNFRAPPVIPNVPFLWAWNAPSEFCLGKFDEPLDMSLFSFIGSPRINATGQGVTIFYVDRLGYYPYIDSITGVTVNGGIPQKISLQDHLDKAKKDITFYMPVDNLGMAVIDWEEWRPTWARNWKPKDVYKNRSIELVQQQNVQLSLTEATEKAKQEFEKAGKDFLVETIKLGKLLRPNHLWGYYLFPDCYNHHYKKPGYNGSCFNVEIKRNDDLSWLWNESTALYPSIYLNTQQSPVAATLYVRNRVREAIRVSKIPDAKSPLPVFAYTRIVFTDQVLKFLSQDELVYTFGETVALGASGIVIWGTLSIMRSMKSCLLLDNYMETILNPYIINVTLAAKMCSQVLCQEQGVCIRKNWNSSDYLHLNPDNFAIQLEKGGKFTVRGKPTLEDLEQFSEKFYCSCYSTLSCKEKADVKDTDAVDVCIADGVCIDAFLKPPMETEEPQIFYNASPSTLSATMFIVSIL

SEQ ID NO: 151 - protein, 462 aa, Homo sapiens
  PH20 36-497
LNFRAPPVIPNVPFLWAWNAPSEFCLGKFDEPLDMSLFSFIGSPRINATGQGVTIFYVDRLGYYPYIDSITGVTVNGGIPQKISLQDHLDKAKKDITFYMPVDNLGMAVIDWEEWRPTWARNWKPKDVYKNRSIELVQQQNVQLSLTEATEKAKQEFEKAGKDFLVETIKLGKLLRPNHLWGYYLFPDCYNHHYKKPGYNGSCFNVEIKRNDDLSWLWNESTALYPSIYLNTQQSPVAATLYVRNRVREAIRVSKIPDAKSPLPVFAYTRIVFTDQVLKFLSQDELVYTFGETVALGASGIVIWGTLSIMRSMKSCLLLDNYMETILNPYIINVTLAAKMCSQVLCQEQGVCIRKNWNSSDYLHLNPDNFAIQLEKGGKFTVRGKPTLEDLEQFSEKFYCSCYSTLSCKEKADVKDTDAVDVCIADGVCIDAFLKPPMETEEPQIFYNASPSTLSATMFIVS

SEQ ID NO: 152 - protein, 460 aa, Homo sapiens
  PH20 36-495
LNFRAPPVIPNVPFLWAWNAPSEFCLGKFDEPLDMSLFSFIGSPRINATGQGVTIFYVDRLGYYPYIDSITGVTVNGGIPQKISLQDHLDKAKKDITFYMPVDNLGMAVIDWEEWRPTWARNWKPKDVYKNRSIELVQQQNVQLSLTEATEKAKQEFEKAGKDFLVETIKLGKLLRPNHLWGYYLFPDCYNHHYKKPGYNGSCFNVEIKRNDDLSWLWNESTALYPSIYLNTQQSPVAATLYVRNRVREAIRVSKIPDAKSPLPVFAYTRIVFTDQVLKFLSQDELVYTFGETVALGASGIVIWGTLSIMRSMKSCLLLDNYMETILNPYIINVTLAAKMCSQVLCQEQGVCIRKNWNSSDYLHLNPDNFAIQLEKGGKFTVRGKPTLEDLEQFSEKFYCSCYSTLSCKEKADVKDTDAVDVCIADGVCIDAFLKPPMETEEPQIFYNASPSTLSATMFI

SEQ ID NO: 153 - protein, 458 aa, Homo sapiens
  PH20 36-493
LNFRAPPVIPNVPFLWAWNAPSEFCLGKFDEPLDMSLFSFIGSPRINATGQGVTIFYVDRLGYYPYIDSITGVTVNGGIPQKISLQDHLDKAKKDITFYMPVDNLGMAVIDWEEWRPTWARNWKPKDVYKNRSIELVQQQNVQLSLTEATEKAKQEFEKAGKDFLVETIKLGKLLRPNHLWGYYLFPDCYNHHYKKPGYNGSCFNVEIKRNDDLSWLWNESTALYPSIYLNTQQSPVAATLYVRNRVREAIRVSKIPDAKSPLPVFAYTRIVFTDQVLKFLSQDELVYTFGETVALGASGIVIWGTLSIMRSMKSCLLLDNYMETILNPYIINVTLAAKMCSQVLCQEQGVCIRKNWNSSDYLHLNPDNFAIQLEKGGKFTVRGKPTLEDLEQFSEKFYCSCYSTLSCKEKADVKDTDAVDVCIADGVCIDAFLKPPMETEEPQIFYNASPSTLSATM

SEQ ID NO: 154 - protein, 456 aa, Homo sapiens
  PH20 36-491
LNFRAPPVIPNVPFLWAWNAPSEFCLGKFDEPLDMSLFSFIGSPRINATGQGVTIFYVDRLGYYPYIDSITGVTVNGGIPQKISLQDHLDKAKKDITFYMPVDNLGMAVIDWEEWRPTWARNWKPKDVYKNRSIELVQQQNVQLSLTEATEKAKQEFEKAGKDFLVETIKLGKLLRPNHLWGYYLFPDCYNHHYKKPGYNGSCFNVEIKRNDDLSWLWNESTALYPSIYLNTQQSPVAATLYVRNRVREAIRVSKIPDAKSPLPVFAYTRIVFTDQVLKFLSQDELVYTFGETVALGASGIVIWGTLSIMRSMKSCLLLDNYMETILNPYIINVTLAAKMCSQVLCQEQGVCIRKNWNSSDYLHLNPDNFAIQLEKGGKFTVRGKPTLEDLEQFSEKFYCSCYSTLSCKEKADVKDTDAVDVCIADGVCIDAFLKPPMETEEPQIFYNASPSTLSA

SEQ ID NO: 155 - protein, 454 aa, Homo sapiens
  PH20 36-489
LNFRAPPVIPNVPFLWAWNAPSEFCLGKFDEPLDMSLFSFIGSPRINATGQGVTIFYVDRLGYYPYIDSITGVTVNGGIPQKISLQDHLDKAKKDITFYMPVDNLGMAVIDWEEWRPTWARNWKPKDVYKNRSIELVQQQNVQLSLTEATEKAKQEFEKAGKDFLVETIKLGKLLRPNHLWGYYLFPDCYNHHYKKPGYNGSCFNVEIKRNDDLSWLWNESTALYPSIYLNTQQSPVAATLYVRNRVREAIRVSKIPDAKSPLPVFAYTRIVFTDQVLKFLSQDELVYTFGETVALGASGIVIWGTLSIMRSMKSCLLLDNYMETILNPYIINVTLAAKMCSQVLCQEQGVCIRKNWNSSDYLHLNPDNFAIQLEKGGKFTVRGKPTLEDLEQFSEKFYCSCYSTLSCKEKADVKDTDAVDVCIADGVCIDAFLKPPMETEEPQIFYNASPSTL

SEQ ID NO: 156 - protein, 455 aa, Homo sapiens
  PH20 36-490
LNFRAPPVIPNVPFLWAWNAPSEFCLGKFDEPLDMSLFSFIGSPRINATGQGVTIFYVDRLGYYPYIDSITGVTVNGGIPQKISLQDHLDKAKKDITFYMPVDNLGMAVIDWEEWRPTWARNWKPKDVYKNRSIELVQQQNVQLSLTEATEKAKQEFEKAGKDFLVETIKLGKLLRPNHLWGYYLFPDCYNHHYKKPGYNGSCFNVEIKRNDDLSWLWNESTALYPSIYLNTQQSPVAATLYVRNRVREAIRVSKIPDAKSPLPVFAYTRIVFTDQVLKFLSQDELVYTFGETVALGASGIVIWGTLSIMRSMKSCLLLDNYMETILNPYIINVTLAAKMCSQVLCQEQGVCIRKNWNSSDYLHLNPDNFAIQLEKGGKFTVRGKPTLEDLEQFSEKFYCSCYSTLSCKEKADVKDTDAVDVCIADGVCIDAFLKPPMETEEPQIFYNASPSTLS

SEQ ID NO: 157 - protein, 452 aa, Homo sapiens
  PH20 36-487
LNFRAPPVIPNVPFLWAWNAPSEFCLGKFDEPLDMSLFSFIGSPRINATGQGVTIFYVDRLGYYPYIDSITGVTVNGGIPQKISLQDHLDKAKKDITFYMPVDNLGMAVIDWEEWRPTWARNWKPKDVYKNRSIELVQQQNVQLSLTEATEKAKQEFEKAGKDFLVETIKLGKLLRPNHLWGYYLFPDCYNHHYKKPGYNGSCFNVEIKRNDDLSWLWNESTALYPSIYLNTQQSPVAATLYVRNRVREAIRVSKIPDAKSPLPVFAYTRIVFTDQVLKFLSQDELVYTFGETVALGASGIVIWGTLSIMRSMKSCLLLDNYMETILNPYIINVTLAAKMCSQVLCQEQGVCIRKNWNSSDYLHLNPDNFAIQLEKGGKFTVRGKPTLEDLEQFSEKFYCSCYSTLSCKEKADVKDTDAVDVCIADGVCIDAFLKPPMETEEPQIFYNASPS

SEQ ID NO: 158 - protein, 450 aa, Homo sapiens
  PH20 36-485
LNFRAPPVIPNVPFLWAWNAPSEFCLGKFDEPLDMSLFSFIGSPRINATGQGVTIFYVDRLGYYPYIDSITGVTVNGGIPQKISLQDHLDKAKKDITFYMPVDNLGMAVIDWEEWRPTWARNWKPKDVYKNRSIELVQQQNVQLSLTEATEKAKQEFEKAGKDFLVETIKLGKLLRPNHLWGYYLFPDCYNHHYKKPGYNGSCFNVEIKRNDDLSWLWNESTALYPSIYLNTQQSPVAATLYVRNRVREAIRVSKIPDAKSPLPVFAYTRIVFTDQVLKFLSQDELVYTFGETVALGASGIVIWGTLSIMRSMKSCLLLDNYMETILNPYIINVTLAAKMCSQVLCQEQGVCIRKNWNSSDYLHLNPDNFAIQLEKGGKFTVRGKPTLEDLEQFSEKFYCSCYSTLSCKEKADVKDTDAVDVCIADGVCIDAFLKPPMETEEPQIFYNAS

SEQ ID NO: 159 - protein, 449 aa, Homo sapiens
  PH20 36-484
LNFRAPPVIPNVPFLWAWNAPSEFCLGKFDEPLDMSLFSFIGSPRINATGQGVTIFYVDRLGYYPYIDSITGVTVNGGIPQKISLQDHLDKAKKDITFYMPVDNLGMAVIDWEEWRPTWARNWKPKDVYKNRSIELVQQQNVQLSLTEATEKAKQEFEKAGKDFLVETIKLGKLLRPNHLWGYYLFPDCYNHHYKKPGYNGSCFNVEIKRNDDLSWLWNESTALYPSIYLNTQQSPVAATLYVRNRVREAIRVSKIPDAKSPLPVFAYTRIVFTDQVLKFLSQDELVYTFGETVALGASGIVIWGTLSIMRSMKSCLLLDNYMETILNPYIINVTLAAKMCSQVLCQEQGVCIRKNWNSSDYLHLNPDNFAIQLEKGGKFTVRGKPTLEDLEQFSEKFYCSCYSTLSCKEKADVKDTDAVDVCIADGVCIDAFLKPPMETEEPQIFYNA

SEQ ID NO: 160 - protein, 441 aa, Homo sapiens
  PH20 36-476
LNFRAPPVIPNVPFLWAWNAPSEFCLGKFDEPLDMSLFSFIGSPRINATGQGVTIFYVDRLGYYPYIDSITGVTVNGGIPQKISLQDHLDKAKKDITFYMPVDNLGMAVIDWEEWRPTWARNWKPKDVYKNRSIELVQQQNVQLSLTEATEKAKQEFEKAGKDFLVETIKLGKLLRPNHLWGYYLFPDCYNHHYKKPGYNGSCFNVEIKRNDDLSWLWNESTALYPSIYLNTQQSPVAATLYVRNRVREAIRVSKIPDAKSPLPVFAYTRIVFTDQVLKFLSQDELVYTFGETVALGASGIVIWGTLSIMRSMKSCLLLDNYMETILNPYIINVTLAAKMCSQVLCQEQGVCIRKNWNSSDYLHLNPDNFAIQLEKGGKFTVRGKPTLEDLEQFSEKFYCSCYSTLSCKEKADVKDTDAVDVCIADGVCIDAFLKPPMETE

SEQ ID NO: 161 - protein, 440 aa, Homo sapiens
  PH20 36-475
LNFRAPPVIPNVPFLWAWNAPSEFCLGKFDEPLDMSLFSFIGSPRINATGQGVTIFYVDRLGYYPYIDSITGVTVNGGIPQKISLQDHLDKAKKDITFYMPVDNLGMAVIDWEEWRPTWARNWKPKDVYKNRSIELVQQQNVQLSLTEATEKAKQEFEKAGKDFLVETIKLGKLLRPNHLWGYYLFPDCYNHHYKKPGYNGSCFNVEIKRNDDLSWLWNESTALYPSIYLNTQQSPVAATLYVRNRVREAIRVSKIPDAKSPLPVFAYTRIVFTDQVLKFLSQDELVYTFGETVALGASGIVIWGTLSIMRSMKSCLLLDNYMETILNPYIINVTLAAKMCSQVLCQEQGVCIRKNWNSSDYLHLNPDNFAIQLEKGGKFTVRGKPTLEDLEQFSEKFYCSCYSTLSCKEKADVKDTDAVDVCIADGVCIDAFLKPPMET

SEQ ID NO: 162 - protein, 439 aa, Homo sapiens
  PH20 36-474
LNFRAPPVIPNVPFLWAWNAPSEFCLGKFDEPLDMSLFSFIGSPRINATGQGVTIFYVDRLGYYPYIDSITGVTVNGGIPQKISLQDHLDKAKKDITFYMPVDNLGMAVIDWEEWRPTWARNWKPKDVYKNRSIELVQQQNVQLSLTEATEKAKQEFEKAGKDFLVETIKLGKLLRPNHLWGYYLFPDCYNHHYKKPGYNGSCFNVEIKRNDDLSWLWNESTALYPSIYLNTQQSPVAATLYVRNRVREAIRVSKIPDAKSPLPVFAYTRIVFTDQVLKFLSQDELVYTFGETVALGASGIVIWGTLSIMRSMKSCLLLDNYMETILNPYIINVTLAAKMCSQVLCQEQGVCIRKNWNSSDYLHLNPDNFAIQLEKGGKFTVRGKPTLEDLEQFSEKFYCSCYSTLSCKEKADVKDTDAVDVCIADGVCIDAFLKPPME

SEQ ID NO: 163 - protein, 438 aa, Homo sapiens
  PH20 36-473
LNFRAPPVIPNVPFLWAWNAPSEFCLGKFDEPLDMSLFSFIGSPRINATGQGVTIFYVDRLGYYPYIDSITGVTVNGGIPQKISLQDHLDKAKKDITFYMPVDNLGMAVIDWEEWRPTWARNWKPKDVYKNRSIELVQQQNVQLSLTEATEKAKQEFEKAGKDFLVETIKLGKLLRPNHLWGYYLFPDCYNHHYKKPGYNGSCFNVEIKRNDDLSWLWNESTALYPSIYLNTQQSPVAATLYVRNRVREAIRVSKIPDAKSPLPVFAYTRIVFTDQVLKFLSQDELVYTFGETVALGASGIVIWGTLSIMRSMKSCLLLDNYMETILNPYIINVTLAAKMCSQVLCQEQGVCIRKNWNSSDYLHLNPDNFAIQLEKGGKFTVRGKPTLEDLEQFSEKFYCSCYSTLSCKEKADVKDTDAVDVCIADGVCIDAFLKPPM

SEQ ID NO: 164 - protein, 437 aa, Homo sapiens
  PH20 36-472
LNFRAPPVIPNVPFLWAWNAPSEFCLGKFDEPLDMSLFSFIGSPRINATGQGVTIFYVDRLGYYPYIDSITGVTVNGGIPQKISLQDHLDKAKKDITFYMPVDNLGMAVIDWEEWRPTWARNWKPKDVYKNRSIELVQQQNVQLSLTEATEKAKQEFEKAGKDFLVETIKLGKLLRPNHLWGYYLFPDCYNHHYKKPGYNGSCFNVEIKRNDDLSWLWNESTALYPSIYLNTQQSPVAATLYVRNRVREAIRVSKIPDAKSPLPVFAYTRIVFTDQVLKFLSQDELVYTFGETVALGASGIVIWGTLSIMRSMKSCLLLDNYMETILNPYIINVTLAAKMCSQVLCQEQGVCIRKNWNSSDYLHLNPDNFAIQLEKGGKFTVRGKPTLEDLEQFSEKFYCSCYSTLSCKEKADVKDTDAVDVCIADGVCIDAFLKPP

SEQ ID NO: 165 - protein, 436 aa, Homo sapiens
  PH20 36-471
LNFRAPPVIPNVPFLWAWNAPSEFCLGKFDEPLDMSLFSFIGSPRINATGQGVTIFYVDRLGYYPYIDSITGVTVNGGIPQKISLQDHLDKAKKDITFYMPVDNLGMAVIDWEEWRPTWARNWKPKDVYKNRSIELVQQQNVQLSLTEATEKAKQEFEKAGKDFLVETIKLGKLLRPNHLWGYYLFPDCYNHHYKKPGYNGSCFNVEIKRNDDLSWLWNESTALYPSIYLNTQQSPVAATLYVRNRVREAIRVSKIPDAKSPLPVFAYTRIVFTDQVLKFLSQDELVYTFGETVALGASGIVIWGTLSIMRSMKSCLLLDNYMETILNPYIINVTLAAKMCSQVLCQEQGVCIRKNWNSSDYLHLNPDNFAIQLEKGGKFTVRGKPTLEDLEQFSEKFYCSCYSTLSCKEKADVKDTDAVDVCIADGVCIDAFLKP

SEQ ID NO: 166 - protein, 435 aa, Homo sapiens
  PH20 36-470
LNFRAPPVIPNVPFLWAWNAPSEFCLGKFDEPLDMSLFSFIGSPRINATGQGVTIFYVDRLGYYPYIDSITGVTVNGGIPQKISLQDHLDKAKKDITFYMPVDNLGMAVIDWEEWRPTWARNWKPKDVYKNRSIELVQQQNVQLSLTEATEKAKQEFEKAGKDFLVETIKLGKLLRPNHLWGYYLFPDCYNHHYKKPGYNGSCFNVEIKRNDDLSWLWNESTALYPSIYLNTQQSPVAATLYVRNRVREAIRVSKIPDAKSPLPVFAYTRIVFTDQVLKFLSQDELVYTFGETVALGASGIVIWGTLSIMRSMKSCLLLDNYMETILNPYIINVTLAAKMCSQVLCQEQGVCIRKNWNSSDYLHLNPDNFAIQLEKGGKFTVRGKPTLEDLEQFSEKFYCSCYSTLSCKEKADVKDTDAVDVCIADGVCIDAFLK

SEQ ID NO: 167 - protein, 434 aa, Homo sapiens
  PH20 36-469
LNFRAPPVIPNVPFLWAWNAPSEFCLGKFDEPLDMSLFSFIGSPRINATGQGVTIFYVDRLGYYPYIDSITGVTVNGGIPQKISLQDHLDKAKKDITFYMPVDNLGMAVIDWEEWRPTWARNWKPKDVYKNRSIELVQQQNVQLSLTEATEKAKQEFEKAGKDFLVETIKLGKLLRPNHLWGYYLFPDCYNHHYKKPGYNGSCFNVEIKRNDDLSWLWNESTALYPSIYLNTQQSPVAATLYVRNRVREAIRVSKIPDAKSPLPVFAYTRIVFTDQVLKFLSQDELVYTFGETVALGASGIVIWGTLSIMRSMKSCLLLDNYMETILNPYIINVTLAAKMCSQVLCQEQGVCIRKNWNSSDYLHLNPDNFAIQLEKGGKFTVRGKPTLEDLEQFSEKFYCSCYSTLSCKEKADVKDTDAVDVCIADGVCIDAFL

SEQ ID NO: 168 - protein, 433 aa, Homo sapiens
  PH20 36-468
LNFRAPPVIPNVPFLWAWNAPSEFCLGKFDEPLDMSLFSFIGSPRINATGQGVTIFYVDRLGYYPYIDSITGVTVNGGIPQKISLQDHLDKAKKDITFYMPVDNLGMAVIDWEEWRPTWARNWKPKDVYKNRSIELVQQQNVQLSLTEATEKAKQEFEKAGKDFLVETIKLGKLLRPNHLWGYYLFPDCYNHHYKKPGYNGSCFNVEIKRNDDLSWLWNESTALYPSIYLNTQQSPVAATLYVRNRVREAIRVSKIPDAKSPLPVFAYTRIVFTDQVLKFLSQDELVYTFGETVALGASGIVIWGTLSIMRSMKSCLLLDNYMETILNPYIINVTLAAKMCSQVLCQEQGVCIRKNWNSSDYLHLNPDNFAIQLEKGGKFTVRGKPTLEDLEQFSEKFYCSCYSTLSCKEKADVKDTDAVDVCIADGVCIDAF

SEQ ID NO: 169 - protein, 431 aa, Homo sapiens
  PH20 36-466
LNFRAPPVIPNVPFLWAWNAPSEFCLGKFDEPLDMSLFSFIGSPRINATGQGVTIFYVDRLGYYPYIDSITGVTVNGGIPQKISLQDHLDKAKKDITFYMPVDNLGMAVIDWEEWRPTWARNWKPKDVYKNRSIELVQQQNVQLSLTEATEKAKQEFEKAGKDFLVETIKLGKLLRPNHLWGYYLFPDCYNHHYKKPGYNGSCFNVEIKRNDDLSWLWNESTALYPSIYLNTQQSPVAATLYVRNRVREAIRVSKIPDAKSPLPVFAYTRIVFTDQVLKFLSQDELVYTFGETVALGASGIVIWGTLSIMRSMKSCLLLDNYMETILNPYIINVTLAAKMCSQVLCQEQGVCIRKNWNSSDYLHLNPDNFAIQLEKGGKFTVRGKPTLEDLEQFSEKFYCSCYSTLSCKEKADVKDTDAVDVCIADGVCID

SEQ ID NO: 170 - protein, 430 aa, Homo sapiens
  PH20 36-465
LNFRAPPVIPNVPFLWAWNAPSEFCLGKFDEPLDMSLFSFIGSPRINATGQGVTIFYVDRLGYYPYIDSITGVTVNGGIPQKISLQDHLDKAKKDITFYMPVDNLGMAVIDWEEWRPTWARNWKPKDVYKNRSIELVQQQNVQLSLTEATEKAKQEFEKAGKDFLVETIKLGKLLRPNHLWGYYLFPDCYNHHYKKPGYNGSCFNVEIKRNDDLSWLWNESTALYPSIYLNTQQSPVAATLYVRNRVREAIRVSKIPDAKSPLPVFAYTRIVFTDQVLKFLSQDELVYTFGETVALGASGIVIWGTLSIMRSMKSCLLLDNYMETILNPYIINVTLAAKMCSQVLCQEQGVCIRKNWNSSDYLHLNPDNFAIQLEKGGKFTVRGKPTLEDLEQFSEKFYCSCYSTLSCKEKADVKDTDAVDVCIADGVCI

SEQ ID NO: 171 - protein, 429 aa, Homo sapiens
  PH20 36-464
LNFRAPPVIPNVPFLWAWNAPSEFCLGKFDEPLDMSLFSFIGSPRINATGQGVTIFYVDRLGYYPYIDSITGVTVNGGIPQKISLQDHLDKAKKDITFYMPVDNLGMAVIDWEEWRPTWARNWKPKDVYKNRSIELVQQQNVQLSLTEATEKAKQEFEKAGKDFLVETIKLGKLLRPNHLWGYYLFPDCYNHHYKKPGYNGSCFNVEIKRNDDLSWLWNESTALYPSIYLNTQQSPVAATLYVRNRVREAIRVSKIPDAKSPLPVFAYTRIVFTDQVLKFLSQDELVYTFGETVALGASGIVIWGTLSIMRSMKSCLLLDNYMETILNPYIINVTLAAKMCSQVLCQEQGVCIRKNWNSSDYLHLNPDNFAIQLEKGGKFTVRGKPTLEDLEQFSEKFYCSCYSTLSCKEKADVKDTDAVDVCIADGVC

SEQ ID NO: 172 - protein, 427 aa, Homo sapiens
  PH20 36-462
LNFRAPPVIPNVPFLWAWNAPSEFCLGKFDEPLDMSLFSFIGSPRINATGQGVTIFYVDRLGYYPYIDSITGVTVNGGIPQKISLQDHLDKAKKDITFYMPVDNLGMAVIDWEEWRPTWARNWKPKDVYKNRSIELVQQQNVQLSLTEATEKAKQEFEKAGKDFLVETIKLGKLLRPNHLWGYYLFPDCYNHHYKKPGYNGSCFNVEIKRNDDLSWLWNESTALYPSIYLNTQQSPVAATLYVRNRVREAIRVSKIPDAKSPLPVFAYTRIVFTDQVLKFLSQDELVYTFGETVALGASGIVIWGTLSIMRSMKSCLLLDNYMETILNPYIINVTLAAKMCSQVLCQEQGVCIRKNWNSSDYLHLNPDNFAIQLEKGGKFTVRGKPTLEDLEQFSEKFYCSCYSTLSCKEKADVKDTDAVDVCIADG

SEQ ID NO: 173 - protein, 425 aa, Homo sapiens
  PH20 36-460
LNFRAPPVIPNVPFLWAWNAPSEFCLGKFDEPLDMSLFSFIGSPRINATGQGVTIFYVDRLGYYPYIDSITGVTVNGGIPQKISLQDHLDKAKKDITFYMPVDNLGMAVIDWEEWRPTWARNWKPKDVYKNRSIELVQQQNVQLSLTEATEKAKQEFEKAGKDFLVETIKLGKLLRPNHLWGYYLFPDCYNHHYKKPGYNGSCFNVEIKRNDDLSWLWNESTALYPSIYLNTQQSPVAATLYVRNRVREAIRVSKIPDAKSPLPVFAYTRIVFTDQVLKFLSQDELVYTFGETVALGASGIVIWGTLSIMRSMKSCLLLDNYMETILNPYIINVTLAAKMCSQVLCQEQGVCIRKNWNSSDYLHLNPDNFAIQLEKGGKFTVRGKPTLEDLEQFSEKFYCSCYSTLSCKEKADVKDTDAVDVCIA

SEQ ID NO: 174 - protein, 423 aa, Homo sapiens
  PH20 36-458
LNFRAPPVIPNVPFLWAWNAPSEFCLGKFDEPLDMSLFSFIGSPRINATGQGVTIFYVDRLGYYPYIDSITGVTVNGGIPQKISLQDHLDKAKKDITFYMPVDNLGMAVIDWEEWRPTWARNWKPKDVYKNRSIELVQQQNVQLSLTEATEKAKQEFEKAGKDFLVETIKLGKLLRPNHLWGYYLFPDCYNHHYKKPGYNGSCFNVEIKRNDDLSWLWNESTALYPSIYLNTQQSPVAATLYVRNRVREAIRVSKIPDAKSPLPVFAYTRIVFTDQVLKFLSQDELVYTFGETVALGASGIVIWGTLSIMRSMKSCLLLDNYMETILNPYIINVTLAAKMCSQVLCQEQGVCIRKNWNSSDYLHLNPDNFAIQLEKGGKFTVRGKPTLEDLEQFSEKFYCSCYSTLSCKEKADVKDTDAVDVC

SEQ ID NO: 175 - protein, 421 aa, Homo sapiens
  PH20 36-456
LNFRAPPVIPNVPFLWAWNAPSEFCLGKFDEPLDMSLFSFIGSPRINATGQGVTIFYVDRLGYYPYIDSITGVTVNGGIPQKISLQDHLDKAKKDITFYMPVDNLGMAVIDWEEWRPTWARNWKPKDVYKNRSIELVQQQNVQLSLTEATEKAKQEFEKAGKDFLVETIKLGKLLRPNHLWGYYLFPDCYNHHYKKPGYNGSCFNVEIKRNDDLSWLWNESTALYPSIYLNTQQSPVAATLYVRNRVREAIRVSKIPDAKSPLPVFAYTRIVFTDQVLKFLSQDELVYTFGETVALGASGIVIWGTLSIMRSMKSCLLLDNYMETILNPYIINVTLAAKMCSQVLCQEQGVCIRKNWNSSDYLHLNPDNFAIQLEKGGKFTVRGKPTLEDLEQFSEKFYCSCYSTLSCKEKADVKDTDAVD

SEQ ID NO: 176 - protein, 419 aa, Homo sapiens
  PH20 36-454
LNFRAPPVIPNVPFLWAWNAPSEFCLGKFDEPLDMSLFSFIGSPRINATGQGVTIFYVDRLGYYPYIDSITGVTVNGGIPQKISLQDHLDKAKKDITFYMPVDNLGMAVIDWEEWRPTWARNWKPKDVYKNRSIELVQQQNVQLSLTEATEKAKQEFEKAGKDFLVETIKLGKLLRPNHLWGYYLFPDCYNHHYKKPGYNGSCFNVEIKRNDDLSWLWNESTALYPSIYLNTQQSPVAATLYVRNRVREAIRVSKIPDAKSPLPVFAYTRIVFTDQVLKFLSQDELVYTFGETVALGASGIVIWGTLSIMRSMKSCLLLDNYMETILNPYIINVTLAAKMCSQVLCQEQGVCIRKNWNSSDYLHLNPDNFAIQLEKGGKFTVRGKPTLEDLEQFSEKFYCSCYSTLSCKEKADVKDTDA

SEQ ID NO: 177 - protein, 417 aa, Homo sapiens
  PH20 36-452
LNFRAPPVIPNVPFLWAWNAPSEFCLGKFDEPLDMSLFSFIGSPRINATGQGVTIFYVDRLGYYPYIDSITGVTVNGGIPQKISLQDHLDKAKKDITFYMPVDNLGMAVIDWEEWRPTWARNWKPKDVYKNRSIELVQQQNVQLSLTEATEKAKQEFEKAGKDFLVETIKLGKLLRPNHLWGYYLFPDCYNHHYKKPGYNGSCFNVEIKRNDDLSWLWNESTALYPSIYLNTQQSPVAATLYVRNRVREAIRVSKIPDAKSPLPVFAYTRIVFTDQVLKFLSQDELVYTFGETVALGASGIVIWGTLSIMRSMKSCLLLDNYMETILNPYIINVTLAAKMCSQVLCQEQGVCIRKNWNSSDYLHLNPDNFAIQLEKGGKFTVRGKPTLEDLEQFSEKFYCSCYSTLSCKEKADVKDT

SEQ ID NO: 178 - protein, 415 aa, Homo sapiens
  PH20 36-450
LNFRAPPVIPNVPFLWAWNAPSEFCLGKFDEPLDMSLFSFIGSPRINATGQGVTIFYVDRLGYYPYIDSITGVTVNGGIPQKISLQDHLDKAKKDITFYMPVDNLGMAVIDWEEWRPTWARNWKPKDVYKNRSIELVQQQNVQLSLTEATEKAKQEFEKAGKDFLVETIKLGKLLRPNHLWGYYLFPDCYNHHYKKPGYNGSCFNVEIKRNDDLSWLWNESTALYPSIYLNTQQSPVAATLYVRNRVREAIRVSKIPDAKSPLPVFAYTRIVFTDQVLKFLSQDELVYTFGETVALGASGIVIWGTLSIMRSMKSCLLLDNYMETILNPYIINVTLAAKMCSQVLCQEQGVCIRKNWNSSDYLHLNPDNFAIQLEKGGKFTVRGKPTLEDLEQFSEKFYCSCYSTLSCKEKADVK

SEQ ID NO: 179 - protein, 473 aa, Homo sapiens
  PH20 36-508
LNFRAPPVIPNVPFLWAWNAPSEFCLGKFDEPLDMSLFSFIGSPRINATGQGVTIFYVDRLGYYPYIDSITGVTVNGGIPQKISLQDHLDKAKKDITFYMPVDNLGMAVIDWEEWRPTWARNWKPKDVYKNRSIELVQQQNVQLSLTEATEKAKQEFEKAGKDFLVETIKLGKLLRPNHLWGYYLFPDCYNHHYKKPGYNGSCFNVEIKRNDDLSWLWNESTALYPSIYLNTQQSPVAATLYVRNRVREAIRVSKIPDAKSPLPVFAYTRIVFTDQVLKFLSQDELVYTFGETVALGASGIVIWGTLSIMRSMKSCLLLDNYMETILNPYIINVTLAAKMCSQVLCQEQGVCIRKNWNSSDYLHLNPDNFAIQLEKGGKFTVRGKPTLEDLEQFSEKFYCSCYSTLSCKEKADVKDTDAVDVCIADGVCIDAFLKPPMETEEPQIFYNASPSTLSATMFIVSILFLIISSVAS

SEQ ID NO: 180 - protein, 471 aa, Homo sapiens
  PH20 36-506
LNFRAPPVIPNVPFLWAWNAPSEFCLGKFDEPLDMSLFSFIGSPRINATGQGVTIFYVDRLGYYPYIDSITGVTVNGGIPQKISLQDHLDKAKKDITFYMPVDNLGMAVIDWEEWRPTWARNWKPKDVYKNRSIELVQQQNVQLSLTEATEKAKQEFEKAGKDFLVETIKLGKLLRPNHLWGYYLFPDCYNHHYKKPGYNGSCFNVEIKRNDDLSWLWNESTALYPSIYLNTQQSPVAATLYVRNRVREAIRVSKIPDAKSPLPVFAYTRIVFTDQVLKFLSQDELVYTFGETVALGASGIVIWGTLSIMRSMKSCLLLDNYMETILNPYIINVTLAAKMCSQVLCQEQGVCIRKNWNSSDYLHLNPDNFAIQLEKGGKFTVRGKPTLEDLEQFSEKFYCSCYSTLSCKEKADVKDTDAVDVCIADGVCIDAFLKPPMETEEPQIFYNASPSTLSATMFIVSILFLIISSV

SEQ ID NO: 181 - protein, 469 aa, Homo sapiens
  PH20 36-504
LNFRAPPVIPNVPFLWAWNAPSEFCLGKFDEPLDMSLFSFIGSPRINATGQGVTIFYVDRLGYYPYIDSITGVTVNGGIPQKISLQDHLDKAKKDITFYMPVDNLGMAVIDWEEWRPTWARNWKPKDVYKNRSIELVQQQNVQLSLTEATEKAKQEFEKAGKDFLVETIKLGKLLRPNHLWGYYLFPDCYNHHYKKPGYNGSCFNVEIKRNDDLSWLWNESTALYPSIYLNTQQSPVAATLYVRNRVREAIRVSKIPDAKSPLPVFAYTRIVFTDQVLKFLSQDELVYTFGETVALGASGIVIWGTLSIMRSMKSCLLLDNYMETILNPYIINVTLAAKMCSQVLCQEQGVCIRKNWNSSDYLHLNPDNFAIQLEKGGKFTVRGKPTLEDLEQFSEKFYCSCYSTLSCKEKADVKDTDAVDVCIADGVCIDAFLKPPMETEEPQIFYNASPSTLSATMFIVSILFLIIS

SEQ ID NO: 182 - protein, 467 aa, Homo sapiens
  PH20 36-502
LNFRAPPVIPNVPFLWAWNAPSEFCLGKFDEPLDMSLFSFIGSPRINATGQGVTIFYVDRLGYYPYIDSITGVTVNGGIPQKISLQDHLDKAKKDITFYMPVDNLGMAVIDWEEWRPTWARNWKPKDVYKNRSIELVQQQNVQLSLTEATEKAKQEFEKAGKDFLVETIKLGKLLRPNHLWGYYLFPDCYNHHYKKPGYNGSCFNVEIKRNDDLSWLWNESTALYPSIYLNTQQSPVAATLYVRNRVREAIRVSKIPDAKSPLPVFAYTRIVFTDQVLKFLSQDELVYTFGETVALGASGIVIWGTLSIMRSMKSCLLLDNYMETILNPYIINVTLAAKMCSQVLCQEQGVCIRKNWNSSDYLHLNPDNFAIQLEKGGKFTVRGKPTLEDLEQFSEKFYCSCYSTLSCKEKADVKDTDAVDVCIADGVCIDAFLKPPMETEEPQIFYNASPSTLSATMFIVSILFLI

SEQ ID NO: 183 - protein, 465 aa, Homo sapiens
  PH20 36-500
LNFRAPPVIPNVPFLWAWNAPSEFCLGKFDEPLDMSLFSFIGSPRINATGQGVTIFYVDRLGYYPYIDSITGVTVNGGIPQKISLQDHLDKAKKDITFYMPVDNLGMAVIDWEEWRPTWARNWKPKDVYKNRSIELVQQQNVQLSLTEATEKAKQEFEKAGKDFLVETIKLGKLLRPNHLWGYYLFPDCYNHHYKKPGYNGSCFNVEIKRNDDLSWLWNESTALYPSIYLNTQQSPVAATLYVRNRVREAIRVSKIPDAKSPLPVFAYTRIVFTDQVLKFLSQDELVYTFGETVALGASGIVIWGTLSIMRSMKSCLLLDNYMETILNPYIINVTLAAKMCSQVLCQEQGVCIRKNWNSSDYLHLNPDNFAIQLEKGGKFTVRGKPTLEDLEQFSEKFYCSCYSTLSCKEKADVKDTDAVDVCIADGVCIDAFLKPPMETEEPQIFYNASPSTLSATMFIVSILF

SEQ ID NO: 184 - protein, 463 aa, Homo sapiens
  PH20 36-498
LNFRAPPVIPNVPFLWAWNAPSEFCLGKFDEPLDMSLFSFIGSPRINATGQGVTIFYVDRLGYYPYIDSITGVTVNGGIPQKISLQDHLDKAKKDITFYMPVDNLGMAVIDWEEWRPTWARNWKPKDVYKNRSIELVQQQNVQLSLTEATEKAKQEFEKAGKDFLVETIKLGKLLRPNHLWGYYLFPDCYNHHYKKPGYNGSCFNVEIKRNDDLSWLWNESTALYPSIYLNTQQSPVAATLYVRNRVREAIRVSKIPDAKSPLPVFAYTRIVFTDQVLKFLSQDELVYTFGETVALGASGIVIWGTLSIMRSMKSCLLLDNYMETILNPYIINVTLAAKMCSQVLCQEQGVCIRKNWNSSDYLHLNPDNFAIQLEKGGKFTVRGKPTLEDLEQFSEKFYCSCYSTLSCKEKADVKDTDAVDVCIADGVCIDAFLKPPMETEEPQIFYNASPSTLSATMFIVSI

SEQ ID NO: 185 - protein, 461 aa, Homo sapiens
  PH20 36-496
LNFRAPPVIPNVPFLWAWNAPSEFCLGKFDEPLDMSLFSFIGSPRINATGQGVTIFYVDRLGYYPYIDSITGVTVNGGIPQKISLQDHLDKAKKDITFYMPVDNLGMAVIDWEEWRPTWARNWKPKDVYKNRSIELVQQQNVQLSLTEATEKAKQEFEKAGKDFLVETIKLGKLLRPNHLWGYYLFPDCYNHHYKKPGYNGSCFNVEIKRNDDLSWLWNESTALYPSIYLNTQQSPVAATLYVRNRVREAIRVSKIPDAKSPLPVFAYTRIVFTDQVLKFLSQDELVYTFGETVALGASGIVIWGTLSIMRSMKSCLLLDNYMETILNPYIINVTLAAKMCSQVLCQEQGVCIRKNWNSSDYLHLNPDNFAIQLEKGGKFTVRGKPTLEDLEQFSEKFYCSCYSTLSCKEKADVKDTDAVDVCIADGVCIDAFLKPPMETEEPQIFYNASPSTLSATMFIV

SEQ ID NO: 186 - protein, 459 aa, Homo sapiens
  PH20 36-494
LNFRAPPVIPNVPFLWAWNAPSEFCLGKFDEPLDMSLFSFIGSPRINATGQGVTIFYVDRLGYYPYIDSITGVTVNGGIPQKISLQDHLDKAKKDITFYMPVDNLGMAVIDWEEWRPTWARNWKPKDVYKNRSIELVQQQNVQLSLTEATEKAKQEFEKAGKDFLVETIKLGKLLRPNHLWGYYLFPDCYNHHYKKPGYNGSCFNVEIKRNDDLSWLWNESTALYPSIYLNTQQSPVAATLYVRNRVREAIRVSKIPDAKSPLPVFAYTRIVFTDQVLKFLSQDELVYTFGETVALGASGIVIWGTLSIMRSMKSCLLLDNYMETILNPYIINVTLAAKMCSQVLCQEQGVCIRKNWNSSDYLHLNPDNFAIQLEKGGKFTVRGKPTLEDLEQFSEKFYCSCYSTLSCKEKADVKDTDAVDVCIADGVCIDAFLKPPMETEEPQIFYNASPSTLSATMF

SEQ ID NO: 187 - protein, 457 aa, Homo sapiens
  PH20 36-492
LNFRAPPVIPNVPFLWAWNAPSEFCLGKFDEPLDMSLFSFIGSPRINATGQGVTIFYVDRLGYYPYIDSITGVTVNGGIPQKISLQDHLDKAKKDITFYMPVDNLGMAVIDWEEWRPTWARNWKPKDVYKNRSIELVQQQNVQLSLTEATEKAKQEFEKAGKDFLVETIKLGKLLRPNHLWGYYLFPDCYNHHYKKPGYNGSCFNVEIKRNDDLSWLWNESTALYPSIYLNTQQSPVAATLYVRNRVREAIRVSKIPDAKSPLPVFAYTRIVFTDQVLKFLSQDELVYTFGETVALGASGIVIWGTLSIMRSMKSCLLLDNYMETILNPYIINVTLAAKMCSQVLCQEQGVCIRKNWNSSDYLHLNPDNFAIQLEKGGKFTVRGKPTLEDLEQFSEKFYCSCYSTLSCKEKADVKDTDAVDVCIADGVCIDAFLKPPMETEEPQIFYNASPSTLSAT

SEQ ID NO: 188 - protein, 453 aa, Homo sapiens
  PH20 36-488
LNFRAPPVIPNVPFLWAWNAPSEFCLGKFDEPLDMSLFSFIGSPRINATGQGVTIFYVDRLGYYPYIDSITGVTVNGGIPQKISLQDHLDKAKKDITFYMPVDNLGMAVIDWEEWRPTWARNWKPKDVYKNRSIELVQQQNVQLSLTEATEKAKQEFEKAGKDFLVETIKLGKLLRPNHLWGYYLFPDCYNHHYKKPGYNGSCFNVEIKRNDDLSWLWNESTALYPSIYLNTQQSPVAATLYVRNRVREAIRVSKIPDAKSPLPVFAYTRIVFTDQVLKFLSQDELVYTFGETVALGASGIVIWGTLSIMRSMKSCLLLDNYMETILNPYIINVTLAAKMCSQVLCQEQGVCIRKNWNSSDYLHLNPDNFAIQLEKGGKFTVRGKPTLEDLEQFSEKFYCSCYSTLSCKEKADVKDTDAVDVCIADGVCIDAFLKPPMETEEPQIFYNASPST

SEQ ID NO: 189 - protein, 451 aa, Homo sapiens
  PH20 36-486
LNFRAPPVIPNVPFLWAWNAPSEFCLGKFDEPLDMSLFSFIGSPRINATGQGVTIFYVDRLGYYPYIDSITGVTVNGGIPQKISLQDHLDKAKKDITFYMPVDNLGMAVIDWEEWRPTWARNWKPKDVYKNRSIELVQQQNVQLSLTEATEKAKQEFEKAGKDFLVETIKLGKLLRPNHLWGYYLFPDCYNHHYKKPGYNGSCFNVEIKRNDDLSWLWNESTALYPSIYLNTQQSPVAATLYVRNRVREAIRVSKIPDAKSPLPVFAYTRIVFTDQVLKFLSQDELVYTFGETVALGASGIVIWGTLSIMRSMKSCLLLDNYMETILNPYIINVTLAAKMCSQVLCQEQGVCIRKNWNSSDYLHLNPDNFAIQLEKGGKFTVRGKPTLEDLEQFSEKFYCSCYSTLSCKEKADVKDTDAVDVCIADGVCIDAFLKPPMETEEPQIFYNASP

SEQ ID NO: 190 - DNA, 2105 bp, Bos taurus
  PH20 DNA
ggtttatctctgttcttggtgaggagacagacagaattgactgctgtgctcatccgcgagggtaaatgtgctcagctctttatggagtagtggagacgggcagagatgacaagatgaagcaacttgcaaaacattcctaaatacgaaggaagaagaatatttaaatgtaaatcatcattattcatttttatccatcaaagtggcttcattctgtgttcatatcttgcatcaaatattaggtacaccaaagcgtgtaggagaaaaaagtgcctttcacagtcatcgctctttgtgatgagaatgctgaggcgccaccatatctcctttcggagctttgctgggtctagcggaacaccccaggcagtgttcaccttccttctgcttccgtgttgtttggctctggacttcagagcaccccctcttatttcaaacacttctttcctctgggcctggaatgccccagttgaacgttgtgttaacagaagatttcaactacctccagatctgagactcttctctgtaaaaggaagcccccagaaaagtgctaccggacaatttattacattattttatgctgatagacttggctactatcctcatatagatgaaaaaacaggcaaaaccgtattcggaggaattccccagttgggaaacttaaaaagtcatatggagaaagcaaaaaatgacattgcctattacataccaaatgacagcgtgggcttggcggtcattgactgggaaaactggaggcctacctgggcaagaaactggaaacctaaagatgtttacagggatgagtcagttgagttggttctgcaaaaaaatccgcaactcagtttcccagaggcttccaagattgcaaaagtggattttgagacagcaggaaagagtttcatgcaagagactttaaaactgggaaaattacttcggccaaatcacttatggggttattatctttttcctgattgttacaatcataatcataaccaacctacttacaatggaaattgccctgatgtagaaaaaaggagaaatgatgatctcgagtggttgtggaaggaaagcactgcccttttcccttctgtttatttgaatatcaggttaaaatctactcaaaatgctgccttgtatgttcgtaatcgtgtccaggaagccattcggttgtctaaaatagcgagtgtcgaaagtccacttccggtttttgtatatgcccgtccagtttttactgatgggtcttcaacatatctttctcagggtgaccttgtgaattcggttggtgagatcgtttctctaggtgcctctgggattataatgtggggcagtctcaatctaagcttatctatgcaatcttgcatgaacctaggcacttacttgaacactacactgaatccttacataatcaacgtcaccctagccgccaaaatgtgcagccaagtgctttgccacaatgaaggagtgtgtacaaggaaacactggaattcaagcgactatcttcacctgaacccaatgaattttgctattcaaactggggaaggtggaaaatacacagtacctgggacagtcacacttgaagacttgcaaaagttttctgatacattttattgcagttgttatgccaacatccactgtaagaagagagttgatataaaaaatgttcatagtgttaacgtgtgtatggcagaagacatttgtatagacagccctgtgaagttacaacccagtgatcattcctccagccaggaggcatctactaccaccttcagcagtatctcaccctccactacaactgccacagtatctccatgtactcctgagaaacactcccctgagtgcctcaaagtcaggtgttcggaagtcatccccaacgtcacccaaaaggcgtgtcaaagtgttaaattgaagaacatttcctatcagtcacctattcaaaatattaaaaatcaaacaacctattaaaattaaattcagtaaaaaaaaaaaaaaaaaaaaaaaaaaaaaaaaaaaaaaaaaaaaaaaaaaaaaaaaaaaaaaaaaaaaaaaaaaaaaaaaaaaaaaaaaaaaaaaaaaaaaaaaaaaaaaaaaaaaaaaagaaaaaaaaaaaaaaa

SEQ ID NO: 191 - DNA, 1971 bp, Bos taurus
  Hyal1 DNA
ttggtgcgcctggtgccagacttaaggaacagaatcttgctgatgcctgcacaggccctcgccctggggtcaggaagtttggagaatgaggcctttcagccttgaggtttccctacacctgccctgggctatggcagcccacttgcttcctgtctgcaccctgttcctgaacttgctcagcatgacccaaggctcccgggaccctgtggtccccaaccagcccttcactaccatctggaatgccaacaccgagtggtgtatgaagaaacacggcgtggacgtagacatcagtatctttgatgtggtgaccaacccggggcagaccttccgcggccctaacatgaccattttctacagctcccagctgggtacctacccttactatacatctgctggggagcctgtgtttggtggcctgccccagaatgccagcctgaatgcccacctggcccgcacattccaggacatcctggctgccatgcctgagcctcgcttctcagggctggcagtcattgactgggaggcatggcgcccgcgctgggccttcaactgggacaccaaggacatttaccggcagcgctcacgggcattggtacagaagcagcacccagactggctagctcctcgggtggaggccgcagctcaggaccagttcgagggggctgcagaggagtggatggcaggcaccctcaagctgggacaagcactgcgccctcagggcctctggggcttctataatttccctgagtgctacaactatgactttaaaagtcccaactatacaggccggtgtccactaaacatctgtgcccagaatgaccagctcgggtggctgtggggccagagccgtgccctctaccccagcatctacctgcctgcagcactggagggcacgaagaagacacagatgttcgtgcagcaccgtgtggctgaggcattccgtgtggcagcgggtgcgggggaccccaagctgccggtgctgccctacatgcagctcttctacgacatgactaaccactttctgcccgcggaggagctggagcacagcctgggggagagtgcagcccagggtgcagcgggagtggtgctctgggtgagctggctgagcacaagcaccaaggaatcatgccaggccatcaaggagtatgtggacacgacgctgggaccctccatcctgaatgtgaccagcggggctcgtctgtgcagtcaggtcctatgctccggccatggccgttgtgcccggcgccccagttaccccaaggcccgcctcatcctcaactccaccagtttttccatcaagcctacacctggtggtgggcccctgaccctacaaggtgccctctcgctcgaggatcggttgcggatggcagtggagttcgaatgtcgctgctaccgtgggtggagggggacacggtgtgagcagtggggcatgtggtgattggcatgggcacgcactgagtacctgatgcaagctgggcctggctaggtagggctttcccaagtccaggcagtcacaggagtcatggttacagtcagaagtccactcagccagtgtcatgagcatacaccagtgtgcacacctgcttacagaccaagatagctgcataaggacacggtgtgagcagtggggcatatgctgattggcatgggcacacactgagtacctgatgcaatctgggcctggctagggctttcccaagtccaggcagtcacaggagtcatggttaggcatccagtcacaggagtcatgtcaggcatcctgccgacagagtcaaaaatacttcctctggagacactgagtcagtcttcaaacagaagcagtcacaagcactgacattcgggacttccctggccatccagtggttaagacacggagcttccactgcagggggcacgggcagagactaagatcacgaatgctaagcggtgcggttaaacaaataacaaataaataaactgacattcactggg

SEQ ID NO: 192 - DNA, 1912 bp, Bos taurus
  Hyal2 DNA
caagtcgccggcgggctgcccaaagggcaggagctggcgcgaatagcttggctagagacttaccccgggaaggagggaggccgccgacctactgggccgacggactcccacacagttcctgagctggtgcctggcaggtgacactgacttcctgcagcccccagcatgtggacaggcctgggccccgccgtcacactggccctggtgttggtggtggcatgggccacggagctgaagcccacagcaccacccatcttcacgggccggccctttgtggtcgcatgggatgtgcccacacaggactgtggcccgcgccacaagatgccattggacccaaaggacatgaaggcctttgatgttcaggcttcacctaacgagggttttgtaaatcagaacatcaccatcttctaccgtgaccggctgggcatgtatccacacttcaattcggtggggaggtcagtacatggtggtgtgccacagaatggcagcctctgggtacacctggagatgctgaagggacacgtggaacactacattcgtacacaggagcctgcagggctggcagtcatcgactgggaggactggcggccagtgtgggtgcgcaactggcaggacaaggatgtgtaccgccgattatcacgccatttggtagccattcgccaccctgattggccaccagagcgcgtagccaaggaggcgcagtatgagtttgagttcgctgcacggcagttcatgctggagacattgcgatttgtcaaggcgtttcggcctcggcacctatggggcttctacctcttccctgactgttacaaccatgattatgtgcagaactgggagacctatacaggccgctgccctgatgttgaggtctcccgaaatgaccagctggcctggctctgggccgagagcacggccctcttcccctctgtctacttggaagagacactggcttcctccactcacggccgcaactttgtcagctttcgtgtccaggaggctcttcgcgtggctgacgtccaccatgccaaccatgcactccccgtctacgtcttcacgaggcccacctatagccgtggactcacagggcttagcgagatggatctcatctccaccattggtgagagtgctgccctgggtgcagctggcgtcatcctctggggtgacgcagggtttaccaccagcaacgagacctgccgacgcctcaaggattatctgactcggtcattggtaccctatgtcgtcaatgtgtcctgggctgcccagtactgcagctgggcccagtgccatggccatgggcgctgtgtgcgccgggaccccaacgctcacaccttcctgcacctcagtgccagcagcttccgtctagtgcctagccacgcacctgatgagccgcggctgcgaccagagggggaactcagttgggccgaccgcaaccacctacagatgcactttcgctgccagtgctacttaggctggggcggtgagcaatgccagtgggaccgcaggcgggcagctgggggtgccagtggggcctgggctgggtcccacctcactggcctgctggcagtggcagtcctggccttcacctagactttgtaagggtctctcacccagctgccacgccagctggcctctgccacaaggggtctgtcaggcatgtaggagcctgcaaggggtggacaaaccagagtctggaggggcagagccctctgggatgcctggtaggatgtccttaccagctcccaccccctgttctaagggggaggggcagtcccctggaaggccccgtctctccctgccagagaggaagaggggcacagctgggccggggaggacctgaccctactcccctgcccctggatagtttattattattattttggggtctcttttgtaaattaaatataaaacaact

SEQ ID NO: 193 - DNA, 1537 bp, Ovis aries
  Hyal2 DNA
gcaaatgacactgacttcctgcagcccccagcatgtggacaggcctgggccccgccgtcacactggccctggtgttggtggtggcatgggccacagagctgaagcccacagcaccacccatcttcacgggccggccctttgtggttgcatgggatgtgcccacacaggactgtggcccacgccacaagatgccattggacccaaaggacatgaaggcctttgatgtgcaggcctcacctaacgagggttttgtaaatcagaacatcaccatcttctaccgtgaccggctgggcatgtatccacacttcaactcggtggggaggtcagtccatggtggtgtgccacagaatggcagcctctgggtacacctggagatgctgaagggacacgtggaacactacattcgtacacaggagcctgcagggctggcagtcatcgactgggaggactggcggccagtgtgggtgcgcaactggcaggacaaggatgtgtaccgccgattatcacgccagttggtggccagtcaccaccccgattggccaccagagcgcatagtcaaggaggcgcagtatgagtttgagttcgctgcacggcagttcatgctggagacactgcgatttgtcaaggcgtttcggcctcggcacctatggggcttctacctcttccctgactgttacaaccatgattatgtgcaaaactgggagacctatacaggccgctgccctgatgttgaggtctcccgaaatgaccagctgtcctggctctgggccgagagcacagccctcttcccctctgtctacctggaagagacgctggcttcctccactcacggccgcaactttgtcagctttcgtgtccaggaggctcttcgcgtggctgacgtccaccatgccaaccatgcactcccagtctacgtcttcacgaggcccacctacagccgtggactcacagggcttagcgagatggatctcatctccaccattggtgagagtgctgccctgggtgcagccggcgtcatcctctggggtgacgcagggtttaccaccagcaacgagacctgccgacgcctcaaggattatctgactcggtcactggtaccctatgtcgtcaatgtgtcctgggctgcccagtactgcagctgggcccagtgccatggccatgggcgctgtgtgcgccgggaccccaacgctcacaccttcctgcacctcagtgccagcagcttccgtctagtgcctagccacgcacctgatgagccgcggctgcgaccagagggggagctcagttgggccgaccgcaaccacctacagacgcactttcgctgccagtgctacttaggctggggcggtgagcagtgccagtgggaccgcaggcgggcagctgggggtgccagtggggcctgggctgggtcccacctcactggcctgctggcagtggcagtcctggccttcacctggacttcgtaagggtctcacccagctgccaggccagctggcctctgccacaaggggtctgccaggcatgtagcagcccacaaggg

SEQ ID NO: 194 - DNA, 1967 bp, Ovis aries
  Hyaluronidase DNA
actcctgtttatctctgttcttggtgaggagacagacagaattgactgctgtgctcatccaccaggttacagatgaagcaacttgcaaaacattcctaaatacgaaggaagaagagtatttaaacgtaaatcatcattattcatttttatccatcaaagtagcttcattctgtgttcctatcttgcatcaaatattaggtaaaccaaagtgtgtaggagaaaaaagtgcttttcatagtcatcgctctttgtgaagagaatgctaaggcgccgccatatctcctttaggagctttgttggggccagtggaacaccccaggcggcgctcgccttccttctgcttccatgttggttggctctggacttcagagcaccccctcttatttcaaacacttctttcctctgggcctggaatgccccagctgaacgttgtgttaaaatctttaaactacctccagatctgagactcttctctgtaaaaggaagcccccaaaaaagtgctacgggacaatttattacattattttatgctgatagacttggctactatcctcatatagatgaaaaaacaggcaacaccgtatatggaggaattccccagttgggaaacttaaaaaatcatttggaaaaagccaaaaaagacattgcctattatataccaaatgacagcgtgggcttggcggtcattgactgggaaaactggaggcctacctgggcaagaaactggaaacctaaagatgtttacagggatgagtctgttgagttggttctgcaaaaaaatccacaactcagtttcccagaggcttccaagattgcaaaagtggattttgagacagcaggaaagagtttcatgcaagagactttaaaactgggaaaattacttcggccaaatcacttatggggttattatctttttcctgattgttacaatcataattataaccagcctacttacaatggaaattgctctgatttagaaaaaaggagaaatgatgatctcgactggttgtggaaggaaagcactgcccttttcccttctgtttatttgaatatcaagttaaaatctactccaaaagctgccttctatgttcgtaatcgtgtccaggaagccattcggttgtctaaaatagcgagtgttgaaagtccacttccggtttttgtatatcaccgtccagtttttactgatgggtcttcaacatacctttctcagggtgaccttgtgaattcggttggtgagatcgttgctctaggtgcctctgggattataatgtggggcagtctcaatctaagcctaactatgcaatcttgcatgaacctaggcaattacttgaacactacactgaatccttacataatcaacgtcaccctagcagccaaaatgtgcagccaagtgctttgccacgatgaaggagtgtgtacaaggaaacaatggaattcaagcgactatcttcacctgaacccaatgaattttgctattcaaactgggaaaggtggaaaatacacagtacctgggaaagtcacacttgaagacctgcaaacgttttctgataaattttattgcagttgttatgccaacatcaactgtaagaagagagttgatataaaaaatgttcatagtgttaatgtatgtatggcagaagacatttgtatagagggccctgtgaagttacaacccagtgatcattcctctagccagaatgaggcatctactaccaccgtcagcagtatctcaccctctactacagccaccacagtatctccatgtactcctgagaaacagtcccctgagtgcctcaaagtcaggtgtttggaagccatcgccaacgtcacccaaacggggtgtcaaggtgttaaatggaagaacacttccagtcagtcaagtattcaaaatattaaaaatcaaacaacctattaaaatataaattcagtgcttattaagaaaaaaaaaaaaaaaaaaaaaaaaaaaa

SEQ ID NO: 195 - DNA, 2116 bp, Homo sapiens
  HAS1
cggagagaagagagagcccggccagacccactgcgatgagacagcaggacgcgcccaagcccactcctgcagcctgccgctgctccggcctggcccggagggtgctgaccatcgccttcgccctgctcatcctgggcctcatgacctgggcctacgccgccggggtgccgctggcctccgatcgctacggcctcctggccttcggcctctacggggccttcctttcagcgcacctggtggcgcagagcctcttcgcgtacctggagcaccggcgggtggcggcggcggcgcgggggccgctggatgcagccaccgcgcgcagtgtggcgctgaccatctccgcctaccaggaggaccccgcgtacctgcgccagtgcctggcgtccgcccgcgccctgctgtacccgcgcgcgcggctgcgcgtcctcatggtggtggatggcaaccgcgccgaggacctctacatggtcgacatgttccgcgaggtcttcgctgacgaggaccccgccacgtacgtgtgggacggcaactaccaccagccctgggaacccgcggcggcgggcgcggtgggcgccggagcctatcgggaggtggaggcggaggatcctgggcggctggcagtggaggcgctggtgaggactcgcaggtgcgtgtgcgtggcgcagcgctggggcggcaagcgcgaggtcatgtacacagccttcaaggcgctcggagattcggtggactacgtgcaggtctgtgactcggacacaaggttggaccccatggcactgctggagctcgtgcgggtactggacgaggacccccgggtaggggctgttggtggggacgtgcggatccttaaccctctggactcctgggtcagcttcctaagcagcctgcgatactgggtagccttcaatgtggagcgggcttgtcagagctacttccactgtgtatcctgcatcagcggtcctctaggcctatataggaataacctcttgcagcagtttcttgaggcctggtacaaccagaagttcctgggtacccactgtacttttggggatgaccggcacctcaccaaccgcatgctcagcatgggttatgctaccaagtacacctccaggtcccgctgctactcagagacgccctcgtccttcctgcggtggctgagccagcagacacgctggtccaagtcgtacttccgtgagtggctgtacaacgcgctctggtggcaccggcaccatgcgtggatgacctacgaggcggtggtctccggcctgttccccttcttcgtggcggccactgtgctgcgtctgttctacgcgggccgcccttgggcgctgctgtgggtgctgctgtgcgtgcagggcgtggcactggccaaggcggccttcgcggcctggctgcggggctgcctgcgcatggtgcttctgtcgctctacgcgcccctctacatgtgtggcctcctgcctgccaagttcctggcgctagtcaccatgaaccagagtggctggggcacctcgggccggcggaagctggccgctaactacgtccctctgctgcccctggcgctctgggcgctgctgctgcttgggggcctggtccgcagcgtagcacacgaggccagggccgactggagcggcccttcccgcgcagccgaggcctaccacttggccgcgggggccggcgcctacgtgggctactgggtggccatgttgacgctgtactgggtgggcgtgcggaggctttgccggcggcggaccgggggctaccgcgtccaggtgtgagtccagccacgcggatgccgcctcaagggtcttcaggggaggccagaggagagctgctgggccccgagccacgaacttgctgggtggttctctgggcctcagtttccctcctctgcaaaacgagggggtcagcccaagattcttcagtctggactatattgggactgggacttctgggtctccagggagggtatttattggtcagggtgtgggatctgaggagtggagggaaagggtcctgctttctcctcgttcttatttaatctccatttctactgtgtgatcaggatgtaataaagaattttatttattttcaaaaaaaaaaaaaaaaaaaaaaaaaaaaa

SEQ ID NO: 196 - DNA, 3275 bp, Homo sapiens
  HAS2
gaagtcaagacgtctggaaagaattacccagtcctggcttcgagcagcccattgaaccagagacttgaaacagccccagccaaagacttttctcccaattctgcgcttcctgggttctgctgagtcttccacaggctttttttttttttttttttttttttaagacgaaaaagagattttctgttatcgggggcagaaagactgaagcccaaaaaaaaaaaaaaaaaaaaaagaaaagaaaagaaaaaagaaaagttaatttatttttaaagcataatttttttaagaattagactgaagtgcaacggaaacataaagagaatattagtgaaattattttttaaagtggggaagaatcaaacatttaagactcccctatcctttttaaatgttgtttttaaatttcttattttttttggccggtcgtctcaaattcatctgatctcttattacctcaattttggaaactgcccgccaccgaccctccgggaccacacagacaggctgaggacgactttatgaccaagagctgaacaagatgcattgtgagaggtttctatgtatcctgagaataattggaaccacactctttggagtctctctcctccttggaatcacagctgcttatattgttggctaccagtttatccaaacggataattactatttctcttttggactgtatggtgcctttttggcatcacacctcatcatccaaagcctgtttgcctttttggagcaccgaaaaatgaaaaaatccctagaaacccccataaagttgaacaaaacagttgccctttgcatcgctgcctatcaagaagatccagactacttaaggaaatgtttgcaatctgtgaaaaggctaacctaccctgggattaaagttgtcatggtcatagatgggaactcagaagatgacctttacatgatggacatcttcagtgaagtcatgggcagagacaaatcagccacttatatctggaagaacaacttccacgaaaagggtcccggtgagacagatgagtcacataaagaaagctcgcaacacgtaacgcaattggtcttgtccaacaaaagtatctgcatcatgcaaaaatggggtggaaaaagagaagtcatgtacacagccttcagagcactgggacgaagtgtggattatgtacaggtttgtgattcagacactatgcttgacccagcctcatctgtggagatggtaaaagttttagaagaagatcccatggttggaggtgttgggggagatgtccagattttaaacaagtacgattcctggatctcattcctcagcagtgtaagatattggatggcttttaatatagaaagggcctgtcagtcttattttgggtgtgttcagtgcattagtggacctctgggaatgtacagaaactccttgttgcatgagtttgtggaagattggtacaatcaagaatttatgggcaaccaatgtagctttggtgatgacaggcatctcacgaaccgggtgctgagcctgggctatgcaacaaaatacacagctcgatctaagtgccttactgaaacacctatagaatatctcagatggctaaaccagcagacccgttggagcaagtcctacttccgagaatggctgtacaatgcaatgtggtttcacaaacatcacttgtggatgacctacgaagcgattatcactggattctttcctttctttctcattgccacagtaatccagctcttctaccggggtaaaatttggaacattctcctcttcttgttaactgtccagctagtaggtctcataaaatcatcttttgccagctgccttagaggaaatatcgtcatggtcttcatgtctctctactcagtgttatacatgtcgagtttacttcccgccaagatgtttgcaattgcaacaataaacaaagctgggtggggcacatcaggaaggaaaaccattgttgttaatttcataggactcattccagtatcagtttggtttacaatcctcctgggtggtgtgattttcaccatttataaggagtctaaaaggccattttcagaatccaaacagacagttctaattgttggaacgttgctctatgcatgctattgggtcatgcttttgacgctgtatgtagttctcatcaataagtgtggcaggcggaagaagggacaacaatatgacatggtgcttgatgtatgatcttccatgttttgacgtttgcagtcacacacaacaccttagttcctctaggggctgtacagtattgtggcatcagataatgccaccaaaggagacatatcactgctgctgggacttgaacaaagacatttatatgggtttattttcattctgccaaagtaaaacaatacatcaacaagaagaaactcagatttaacctgttatttctatgaaaatgggatgaattctttgtttatgcactttttccttactgtgcatccgcctgaaagtgttttgccctatatacctcactagccatgctttatgtgggttatcatggaagaaaaggattttggaaactcaaggaaaagttctttcaacctatacaacctaacttatggactgttttgatagatgataattttttttttttaggaaggattttctttttaactttaccaaatgaaatgccaaaggaagttttaaaggccgttggctgtgctgtattttgatataattgtactgtgtttttaaattttgtatgccaatcttaaagacaaattttgcatattctctattttacttttctgccaaaataaacctgttcttccttttttaaaataaaataagttcttaaaaaatttatacttaaaaaatcctgcccaaaatgtgaagcttggttgactgatgttcatgatagaaagaataaaatgtttctctctctctaccttttaaaattgaatagtttatttctgtgaaagaagtatttaaactttcaatattttaactttttgtttttatttcttttagaaaaggccaatatacctatcacactttggaagtaaaaatacacactttcgtgtgtacctaaaaaaaaaatcgttgaaaatcaaggccaaaggtagtgcaattttttcattaagatttaaaaaaaagggaatgatagtctttgaaagaaaacagtaggcatccagcactggacaaaacatgggtatcaaagatgaataatctttggagattctggcagtgttttcccagaacaagtcaagtggaaagtggagaaattatctgtataattttggacacatacaatgcagtt

SEQ ID NO: 197 - DNA, 4220 bp, Homo sapiens
  HAS3 transcript variant 1
gagtgcgttcgcggctgctttgacctggtgggcgccgcctccggcactgcaccgaggcggggcgccagcgcccaggttgctgggctggccttggcgcccccttcccctacccagagcgcaggcaggcaggggggtcccgccgcgccccttcagcatatgccggtgcagctgacgacagccctgcgtgtggtgggcaccagcctgtttgccctggcagtgctgggtggcatcctggcagcctatgtgacgggctaccagttcatccacacggaaaagcactacctgtccttcggcctgtacggcgccatcctgggcctgcacctgctcattcagagcctttttgccttcctggagcaccggcgcatgcgacgtgccggccaggccctgaagctgccctccccgcggcggggctcggtggcactgtgcattgccgcataccaggaggaccctgactacttgcgcaagtgcctgcgctcggcccagcgcatctccttccctgacctcaaggtggtcatggtggtggatggcaaccgccaggaggacgcctacatgctggacatcttccacgaggtgctgggcggcaccgagcaggccggcttctttgtgtggcgcagcaacttccatgaggcaggcgagggtgagacggaggccagcctgcaggagggcatggaccgtgtgcgggatgtggtgcgggccagcaccttctcgtgcatcatgcagaagtggggaggcaagcgcgaggtcatgtacacggccttcaaggccctcggcgattcggtggactacatccaggtgtgcgactctgacactgtgctggatccagcctgcaccatcgagatgcttcgagtcctggaggaggatccccaagtagggggagtcgggggagatgtccagatcctcaacaagtacgactcatggatttccttcctgagcagcgtgcggtactggatggccttcaacgtggagcgggcctgccagtcctactttggctgtgtgcagtgtattagtgggcccttgggcatgtaccgcaacagcctcctccagcagttcctggaggactggtaccatcagaagttcctaggcagcaagtgcagcttcggggatgaccggcacctcaccaaccgagtcctgagccttggctaccgaactaagtataccgcgcgctccaagtgcctcacagagacccccactaagtacctccggtggctcaaccagcaaacccgctggagcaagtcttacttccgggagtggctctacaactctctgtggttccataagcaccacctctggatgacctacgagtcagtggtcacgggtttcttccccttcttcctcattgccacggttatacagcttttctaccggggccgcatctggaacattctcctcttcctgctgacggtgcagctggtgggcattatcaaggccacctacgcctgcttccttcggggcaatgcagagatgatcttcatgtccctctactccctcctctatatgtccagccttctgccggccaagatctttgccattgctaccatcaacaaatctggctggggcacctctggccgaaaaaccattgtggtgaacttcattggcctcattcctgtgtccatctgggtggcagttctcctgggagggctggcctacacagcttattgccaggacctgttcagtgagacagagctagccttccttgtctctggggctatactgtatggctgctactgggtggccctcctcatgctatatctggccatcatcgcccggcgatgtgggaagaagccggagcagtacagcttggcttttgctgaggtgtgacatggcccccaagcagagcgggtaaagtgcaatgggtaagggagggaaggggaatggaagagaaaagacagggtgggagggaggagggagtgctgtgttttagtctcttaatggtccaaaggacaaatctaaaatgcaaagaacggtgatgtagtatggcctgacagctctgtttagaggaggcaacactgatcccccagatgcagggctgcaggggattctgtgttttcagactgcctgtctgcttgcatctgcacataggcagtagcctcctcctgggctccagagggcactcagaagttgtgctaaaccaagttaagtcccattcagtggcaacttgtgataggtacctgagtgacggcaacctgcggaaggaggttctcccagcccatctgaacacaaccagaggtggcaggagaatttctactgagcgagctgggccggttagtgtatgtcacccccaccccacccctaagtagtcatcaatgcaataagattgcgcctgagatacaaggcccagaagcctgatctttgggcatcagaaaacagggtccaggaatggtgctttatgtgagataccccactccacatcaacattccagggatgagccaaaccagcagggagttagcactgaactgcttttaaaagtgcacattaaaaaggaaagtttgccaggaggaacaaagagattgtggtggtgctaaaggaggccataagctacacagaggccttgggtgttccacctggaaactgctcagacgtctagatgggttcttagcttgtctgtgatctctgctggggagataaaaagattaagccccaacatgttcagaaaagaagtgaagtcttgggtattttaacctgtatactcttgaattcctctcaaattcagctctgatctgaggctaagacacactccccacttcactttcttcaaagccacattttttgaggtatcactgcagtcacctcttctaccctcatcatcataggtaaggttttcaaggtggcaattggggcggagccccggctcttatagaagcttcagcaggaggcaagcgtgttctcagcacatatgggaactatgaggagcctctgatcaaattggctacaatcttggagctgcttggacggattccttggcagccgggttagcatgtgtgactttcaggctactgttcttgacaatcatctccaatggaaagcttttcagtgttcccaaagtgaactctcaaatccaaaatggttatctttgagaccatccattctcctcagtggcttctccagggaattcttacagccaagttgtgacagtcactgcatttgcctgcttctttccagaaaccaaactaggagatgaaactggttcctacatcctaaggttcttgctttctctctcatgcctcctgaggctgtttttggctgttttccctctgctgcttttggggaatgaggggaagccattttccagtgacttgcaatccaggctgttctcagcgttttgagtttaaaacctgggatcctgactaagcctttgacttaagggttgcttgcttgccctccaaatgtcctttctcagaggggccagctaacccgtgcagaaccagcactaaggtggacagcagacaagagggcaagcctctagtgtaccaagtgcttcctacaaagacgcaaggtgtgctctgagccacagatgggcaaaccctggtgctttccttcatctcccacgaactcaagggttttccaggtgtagctaacagttgccacatcacacagacctcgagtttctggtaagactgctggttgacatcagacccaacccatgaaggctggaaggcagcaggcatttgctaaggcagctgatccaggcaatcgttctgctggccaagaagttaaactattttgagcattagaatggaggaaatccggtcagccaagtgcagagttcagacttcgctaagggcttgtttttcttcagcatttacttgaagattaatgtaggatgacaggctctcctggctgtcctaccatcagctctgccttgcactgtggtcgtcaactttcctcaaatcaaaaacaggcaggtacaggtagtgggctcacaacgtttgacctcgactggtttttctaagttattttgtacatttttcagcagcaaaaccaaactgggtcttcagctttatccccgtttcttgcaagggaagagcctttatacaattggacgcattttggtttttcctcattgagaattcaaatcctcttttgtattgtttctacaataatttgtaaacatatttatttttacctgcttttttttttttttttaattttcaggtcaagttttttatactgcacttatttgtcaaaataaagattctcacatatgccggttatctcgaaa

SEQ ID NO: 198 - DNA, 1229 bp, Homo sapiens
  HAS3 transcript variant 2
ggaggggcatggagccgccgcgggcctgctgagctccggagcgcggcagccggcggcacgatgccggtgcagctgacgacagccctgcgtgtggtgggcaccagcctgtttgccctggcagtgctgggtggcatcctggcagcctatgtgacgggctaccagttcatccacacggaaaagcactacctgtccttcggcctgtacggcgccatcctgggcctgcacctgctcattcagagcctttttgccttcctggagcaccggcgcatgcgacgtgccggccaggccctgaagctgccctccccgcggcggggctcggtggcactgtgcattgccgcataccaggaggaccctgactacttgcgcaagtgcctgcgctcggcccagcgcatctccttccctgacctcaaggtggtcatggtggtggatggcaaccgccaggaggacgcctacatgctggacatcttccacgaggtgctgggcggcaccgagcaggccggcttctttgtgtggcgcagcaacttccatgaggcaggcgagggtgagacggaggccagcctgcaggagggcatggaccgtgtgcgggatgtggtgcgggccagcaccttctcgtgcatcatgcagaagtggggaggcaagcgcgaggtcatgtacacggccttcaaggccctcggcgattcggtggactacatccaggtgtgcgactctgacactgtgctggatccagcctgcaccatcgagatgcttcgagtcctggaggaggatccccaagtagggggagtcgggggagatgtccagcccccagggaaaggtatggcagtagaggatgaccaggtccaagctgcccaggtcagagctacggaagcatggtccgttcaccaacgccacgtttctagagagcagtgagctgattctccaatggtgagcaggggactacatgtgaactgggacctgcaggccaatgtatccctgaggaaaagtccacaagaacaattcaagaaactagtaagaaacaatgggcagaaagctgtgggacgaaagcacagcaggcttctgggaggctggagatcctttctctcaagggcaggattattcccacctgccacagttcacatgccacaaataacatctcaccttcagtcaagaaaaacgcaaaggaaaaaaaaaaaaaaaaaaaaaaaaaaaaaaaaaaaaaaaaaaaaaaaaaaaaaaaaaaaaaaaaaaaaaaa

SEQ ID NO: 199 - protein, 509 aa, Pan troglodyte
  Precursor chimpanzee PH20 XP_527873
MGVLKFKHIFFRSFVKSSGVSQIVFTFLLIPCCLTLNFRAPPVIPNVPFLWAWNAPSEFCLGKFDEPLDMSLFSFIGSPRINVTGQDVTIFYVDRLGYYPYIDSITGVTVNGGIPQKISLQDHLDKAKKDITFYMPVDNLGMAVIDWEEWRPTWARNWKPKDVYKNRSIELVQQQNVQLSLTEATEKAKQEFEKAGKDFLVETIKLGKLLRPNHLWGYYLFPDCYNHHYKKPGYNGSCFNVEIKRNDDLSWLWNESTALYPSIYLNTQQSPVAATLYVRNRVQEAIRVSKIPDAKSPLPVFVYTRIVFTDQVLKFLSQDELVYTFGETVALGASGIVIWGTLSIMRSMKSCLLLDNYMETILNPYIINVTLAAKMCSQVLCQEQGVCIRKNWNSSDYLHLNPDNFAIQLEKGGKFTVRGKPTLEDLEQFSEKFYCSCYSTLSCKEKADVKDTDAVDVCIADGVCIDAFLKPPMETEESQIFYNASPSTLSATMFIVSILFLIISSVASL

SEQ ID NO: 200 - protein, 474 aa, Pan troglodyte
  mature chimpanzee PH20 XP_527873
LNFRAPPVIPNVPFLWAWNAPSEFCLGKFDEPLDMSLFSFIGSPRINVTGQDVTIFYVDRLGYYPYIDSITGVTVNGGIPQKISLQDHLDKAKKDITFYMPVDNLGMAVIDWEEWRPTWARNWKPKDVYKNRSIELVQQQNVQLSLTEATEKAKQEFEKAGKDFLVETIKLGKLLRPNHLWGYYLFPDCYNHHYKKPGYNGSCFNVEIKRNDDLSWLWNESTALYPSIYLNTQQSPVAATLYVRNRVQEAIRVSKIPDAKSPLPVFVYTRIVFTDQVLKFLSQDELVYTFGETVALGASGIVIWGTLSIMRSMKSCLLLDNYMETILNPYIINVTLAAKMCSQVLCQEQGVCIRKNWNSSDYLHLNPDNFAIQLEKGGKFTVRGKPTLEDLEQFSEKFYCSCYSTLSCKEKADVKDTDAVDVCIADGVCIDAFLKPPMETEESQIFYNASPSTLSATMFIVSILFLIISSVASL

SEQ ID NO: 201 - protein, 477 aa, Macaca mulatta
  mature Rhesus monkey PH20 EHH17639
LNFRAPPIIPNVPFLWAWNAPSEFCLGKFNEPLDMSLFTLMGSPRINITGQGVTIFYVDRLGYYPYIDLTTGVTVHGGIPQKVSLQDHLDKSKQDILFYMPVDNLGMAVIDWEEWRPTWARNWKPKDVYKNRSIELVQQQNVQLSLPQATDKAKQEFEKAGKDFMLETIKLGRSLRPNHLWGYYLFPDCYNHHYRKPGYNGSCFDVEIKRNDDLSWLWNESTALYPSIYLNTQQSVVVATLYVRNRVREAIRVSKIPDAKNPLPVFVYARLVFTDQVLKFLSREELVSTLGETVALGASGIVIWGSLSITRSMKSCLLLDTYMETILNPYIINVTLAAKMCSQVLCQEQGVCIRKDWNSSDYLHLNPDNFDIRLEKGGKFTVHGKPTVEDLEEFSEKFYCSCYTNLSCKEKADVKDTDAVDVCIADGVCIDASLKPPVETEGSPPIFYNTSSSTVSTTMFIWRLEVWDQGISRIGFF

SEQ ID NO: 202 - protein, 475 aa, Macaca fascicularis
  mature Cynomolgus monkey PH20 P38568.1
LNFRAPPIIPNVPFLWAWNAPSEFCLGKFNEPLDMSLFTLMGSPRINVTGQGVTIFYVDRLGYYPYIDLTTGVTVHGGIPQKVSLQDHLDKSKQDILFYMPVDNLGMAVIDWEEWRPTWARNWKPKDVYKNRSIELVQQQNVQLSLPQATDKAKQEFEKAGKDFMLETIKLGRSLRPNHLWGYYLFPDCYNHHYRKPGYNGSCFDVEIKRNDDLSWLWNESTALYPSIYLNTQQSVVVATLYVRNRVREAIRVSKIPDAKNPLPVFVYARLVFTDQVLKFLSREELVSTLGETVALGASGIVIWGSLSITRSMKSCLLLDTYMETILNPYIINVTLAAKMCSQVLCQEQGVCIRKDWNSSDYLHLNPDNFDIRLEKGGKFTVHGKPTVEDLEEFSEKFYCSCYTNLSCKEKADVKDTDAVDVCIADGVCIDASLKPPVETEGSPPIFYNTSSSTVSTTMFIVNILFLIISSVASL

SEQ ID NO: 203 - protein, 518 aa, Bos taurus
  Mature cow PH20
LDFRAPPLISNTSFLWAWNAPVERCVNRRFQLPPDLRLFSVKGSPQKSATGQFITLFYADRLGYYPHIDEKTGKTVFGGIPQLGNLKSHMEKAKNDIAYYIPNDSVGLAVIDWENWRPTWARNWKPKDVYRDESVELVLQKNPQLSFPEASKIAKVDFETAGKSFMQETLKLGKLLRPNHLWGYYLFPDCYNHNHNQPTYNGNCPDVEKRRNDDLEWLWKESTALFPSVYLNIRLKSTQNAALYVRNRVQEAIRLSKIASVESPLPVFVYARPVFTDGSSTYLSQGDLVNSVGEIVSLGASGIIMWGSLNLSLSMQSCMNLGTYLNTTLNPYIINVTLAAKMCSQVLCHNEGVCTRKHWNSSDYLHLNPMNFAIQTGEGGKYTVPGTVTLEDLQKFSDTFYCSCYANIHCKKRVDIKNVHSVNVCMAEDICIDSPVKLQPSDHSSSQEASTTTFSSISPSTTTATVSPCTPEKHSPECLKVRCSEVIPNVTQKACQSVKLKNISYQSPIQNIKNQTTY

SEQ ID NO: 204 - protein, 439 aa, Bos taurus
  mature cow PH20 AAP55713
LDFRAPPLISNTSFLWAWNAPVERCVNRRFQLPPDLRLFSVKGSPQKSATGQFITLFYADRLGYYPHIDEKTGKTVFGGIPQLGNLKSHLEKAKNDIAYYIPNDSVGLAVIDWENWRPTWARNWKPKDVYRDESVELVLQKNPQLSFPEASKIAKVDFETAGKSFMQETLKLGKLLRPNHLWGYYLFPDCYNHNHNQPTYNGNCPDVEKRRNDDLEWLWKESTALFPSVYLNIRLKSTQNAALYVRNRVQEAIRLSKIASVESPLPVFVYARPVFTDGSSTYLSQGDLVNSVGEIVSLGASGIIMWGSLNLSLSVQSCMNLGTYLNTTLNPYIINVTLAAKMCSQVLCHDGGVCTRKHWNSSDYLHLNPMNFAIQTGEGGKYTVPGTLTLEDLQKFSDTFYCSCYSNLSCKKRVDIKNVHSVDVCMAEDVCIDAFLKPP

SEQ ID NO: 205 - protein, 477 aa, Mus musculus
  Mature mouse PH20 NP_001073344.1
VDYRAAPILSNTTFLWIWNVPTERCVGNVNDPIDLSFFSLIGSPRKTATGQPVTLFYVDRLGLYPHIDANQAEHYGGIPQRGDYQAHLRKAKTDIEHYIPDDKLGLAIIDWEEWRPTWLRNWKPKDNYRNKSIELVQSTNPGLSITEATQKAIQQFEEAGRKFMEGTLHLGKFLRPNQLWGYYLFPDCYNNKFQDPKYDGQCPAVEKKRNDNLKWLWKASTGLYPSVYLKKDLKSNRQATLYVRYRVVEAIRVSKVGNASDPVPIFVYIRLVFTDRTSEYLLEDDLVNTIGEIVALGTSGIIIWDAMSLAQRAAGCPILHKYMQTTLNPYIVNVTLAAKMCSQTLCNEKGMCSRRKESSDVYLHLNPSHFDIMLTETGKYEVLGNPRVGDLEYFSEHFKCSCFSRMTCKETSDVKNVQDVNVCVGDNVCIKAKVEPNPAFYLLPGKSLLFMTTLGHVLYHLPQDIFVFPRKTLVSTP

SEQ ID NO: 206 - protein, 477 aa, Rattus norvegicus
  Mature rat PH20 NP_446419.1
VDYRATPVLSDTTFVWVWNVPTEACVENVTEPIDLSFFSLIGSPRKTAIGQPVTLFYVDRLGNYPHIDAQQTEHHGGIPQKGDLTTHLVKAKEDVERYIPTDKLGLAIIDWEEWRPTWMRNWTPKDIYRNKSIELVQAADPAINITEATVRAKAQFEGAAKEFMEGTLKLGKHIRPKHLWGFYLFPDCYNNKFQVDNYDGQCPDVEKKRNDDLDWLWKESTGLYPSVYLKKDLKSSRKATLYVRYRVLESIRVSKVSDESNPVPIFVYIRLVFTDHVSEYLLEDDLVNTIGEIVAQGTSGIIIWDAMSLAQRSAGCPILRQYMKTTLNPYIVNVTLAAKMCSQTLCKEKGMCSRKTESSDAYLHLDPSSFSINVTEAGKYEVLGKPEVKDLEYFSEHFKCSCFSKMTCEETSDMRSIQDVNVCMGDNVCIKATLGPNSAFHLLPGKGLLLMTTLAHILHHLPHDIFVFPWKMLVSTP

SEQ ID NO: 207 - protein, 510 aa, Oryctolagus cuniculus
  Mature rabbit PH20 NP_001076141.1
ANFRAPPVIPNVPFLWAWNAPTEFCLGKSGEPLDMSLFSLFGSPRKNKTGQGITIFYVDRLGYYPYIDPHTGAIVHGRIPQLGPLQQHLTKLRQEILYYMPKDNVGLAVIDWEEWLPTWLRNWKPKDIYRIKSIELVKSQHPQYNHSYATEKAKRDFEKAGKDFMEETLKLGRLLRPNHLWGYYLFPDCYNHHYDKPNLYKGSCFDIEKKRNDDLSWLWKESTALFPSVYLTSRARSATALSKLYVVRNRVHEAIRVSKIPDDKSPLPNFVYTRLVFTDQIFQFLSHHDLVYTIGEIVALGASGIVVWGSQSLARSMKSCLHLDNYMKTILNPYLINVTLAAKMCNQVLCQEQGVCTRKNWNPNDYLHLNPGNFAIQLGSNGTYKVDGKPTLTDLEQFSKNFQCSCYTNLNCKERTDMNNVRTVNVCAVENVCIDTNVGPQAVTYAPKEKKDVAHILSNTTSINSSTTMSLPFPRKHVSGCLLVLCMYSQYLNICYRLVAIGIQHGYYLK

SEQ ID NO: 208 - protein, 494 aa, Cavia porcellus
  mature guinea pig PH20 NP_001166492.1
DKRAPPLIPNVPLLWVWNAPTEFCIGGTNQPLDMSFFSIVGTPRKNITGQSITLYYVDRLGYYPYIDPHTGAIVHGGLPQLMNLQQHLRKSRQDILFYMPTDSVGLAVIDWEEWRPTWTRNWRPKDIYRNKSIELVKSQHPQYNHSYAVAVAKRDFERTGKAFMLETLKLGKSLRPSSLWGYYLFPDCYNTHFTKPNYDGHCPPIELQRNNDLQWLWNDSTALYPSVYLTSRVRSSQNGALYVRNRVHESIRVSKLMDDKNPLPIYVYIRLVFTDQTTTFLELDDLVHSVGEIVPLGVSGIIIWGSLSLTRSLVSCIGLENYMKGTLLPYLINVTLAAKMCGQVLCKNQGICTRKDWNTNTYLHLNATNFDIELQQNGKFVVHGKPSLEDLQEFSKNFHCSCYTNVACKDRLDVHNVRSVNVCTANNICIDAVLNFPSLDDDDEPPITDDTSQNQDSISDITSSAPPSSHILPKDLSWCLFLLSIFSQHWKYLL

SEQ ID NO: 209 - protein, 540 aa, Vulpes vulpes
  Precursor Red Fox PH20
MGVLRFQNIFFRSFLGSSGTTQAVFIFLLIPRCLTQEFRAPPFIPNVSFLWGWNAPTELCAKRFNVQLDLNLFSLIGSPLKTVVGQGIAIFYADRLGYYPHINKTTGKHVNGGIPQLGSLKKHLDKAKKDISHYIETDSMGLAVIDWDSWRPNWARNWRPKHIYKEQSIDLAQQQHIHLNLTEVTQIAQADFEKAARCFMQETLKLGKFLRPNYLWGFYLYPDCYNYNYKNPNYNGSCYDIEERRNDEIDWLWKESTALFPSIYLKSKLKSSPFTALYVRNRVLEAIRVSKVKDIKHPLPIFVYARPVFTDVLLTYLTEDDLVNTIGESVSLGVSGIVMWGSLNLTENVQICTELDTYIKNKLNPYIINVTLAAKMCSQVLCQDEGVCIRKHWNSNDYLHLNPVNFAIQLERSGRYTVQGKPTLEDLQQFSKKFYCACYANTHCRERVDMTDIHTIKVCVGEDVCIDVYLNLVPSGHLPVWKGKYVTSSNIFSVMPPATGPPCVPGRDLNRCLKARFIVEDNSKTTQTGYQSIYIKNKKQ

SEQ ID NO: 210 - protein, 505 aa, Vulpes vulpes
  Mature Red Fox PH20 Q29152
QEFRAPPFIPNVSFLWGWNAPTELCAKRFNVQLDLNLFSLIGSPLKTVVGQGIAIFYADRLGYYPHINKTTGKHVNGGIPQLGSLKKHLDKAKKDISHYIETDSMGLAVIDWDSWRPNWARNWRPKHIYKEQSIDLAQQQHIHLNLTEVTQIAQADFEKAARCFMQETLKLGKFLRPNYLWGFYLYPDCYNYNYKNPNYNGSCYDIEERRNDEIDWLWKESTALFPSIYLKSKLKSSPFTALYVRNRVLEAIRVSKVKDIKHPLPIFVYARPVFTDVLLTYLTEDDLVNTIGESVSLGVSGIVMWGSLNLTENVQICTELDTYIKNKLNPYIINVTLAAKMCSQVLCQDEGVCIRKHWNSNDYLHLNPVNFAIQLERSGRYTVQGKPTLEDLQQFSKKFYCACYANTHCRERVDMTDIHTIKVCVGEDVCIDVYLNLVPSGHLPVWKGKYVTSSNIFSVMPPATGPPCVPGRDLNRCLKARFIVEDNSKTTQTGYQSIYIKNKKQ

SEQ ID NO: 211 - protein, 585 aa, Artificial Sequence [sequence omitted]

SEQ ID NO: 212 - DNA, 1662 bp, Homo sapiens
  HAS3 variant 1 cDNA
atgccggtgcagctgacgacagccctgcgtgtggtgggcaccagcctgtttgccctggcagtgctgggtggcatcctggcagcctatgtgacgggctaccagttcatccacacggaaaagcactacctgtccttcggcctgtacggcgccatcctgggcctgcacctgctcattcagagcctgtttgccttcctggagcaccggcgcatgcgacgtgccggccaggccctgaagctgccctccccgcggcggggctcggtggcactgtgcattgccgcataccaggaggaccctgactacttgcgcaagtgcctgcgctcggcccagcgcatctccttccctgacctcaaggtggtcatggtggtggatggcaaccgccaggaggacgcctacatgctggacatcttccacgaggtgctgggcggcaccgagcaggccggcttctttgtgtggcgcagcaacttccatgaggcaggcgagggtgagacggaggccagcctgcaggagggcatggaccgtgtgcgggatgtggtgcgggccagcaccttctcgtgcatcatgcagaagtggggaggcaagcgcgaggtcatgtacacggccttcaaggccctcggcgattcggtggactacatccaggtgtgcgactctgacactgtgctggatccagcctgcaccatcgagatgcttcgagtcctggaggaggatccccaagtagggggagtcgggggagatgtccagatcctcaacaagtacgactcatggatttccttcctgagcagcgtgcggtactggatggccttcaacgtggagcgggcctgccagtcctactttggctgtgtgcagtgtattagtgggcccttgggcatgtaccgcaacagcctcctccagcagttcctggaggactggtaccatcagaagttcctaggcagcaagtgcagcttcggggatgaccggcacctcaccaaccgagtcctgagccttggctaccgaactaagtataccgcgcgctccaagtgcctcacagagacccccactaagtacctccggtggctcaaccagcaaacccgctggagcaagtcttacttccgggagtggctctacaactctctgtggttccataagcaccacctctggatgacctacgagtcagtggtcacgggtttcttccccttcttcctcattgccacggttatacagcttttctaccggggccgcatctggaacattctcctcttcctgctgacggtgcagctggtgggcattatcaaggccacctacgcctgcttccttcggggcaatgcagagatgatcttcatgtccctctactccctcctctatatgtccagccttctgccggccaagatctttgccattgctaccatcaacaaatctggctggggcacctctggccgaaaaaccattgtggtgaacttcattggcctcattcctgtgtccatctgggtggcagttctcctgggagggctggcctacacagcttattgccaggacctgttcagtgagacagagctagccttccttgtctctggggctatactgtatggctgctactgggtggccctcctcatgctatatctggccatcatcgcccggcgatgtgggaagaagccggagcagtacagcttggcttttgctgaggtgtag

SEQ ID NO: 213 - DNA, 10836 bp, Artificial Sequence
  pLV-EF1a-hHAS3-IRES-Hyg vector
aagcttaatgtagtcttatgcaatactcttgtagtcttgcaacatggtaacgatgagttagcaacatgccttacaaggagagaaaaagcaccgtgcatgccgattggtggaagtaaggtggtacgatcgtgccttattaggaaggcaacagacgggtctgacatggattggacgaaccactgaattgccgcattgcagagatattgtatttaagtgcctagctcgatacataaacgggtctctctggttagaccagatctgagcctgggagctctctggctaactagggaacccactgcttaagcctcaataaagcttgccttgagtgcttcaagtagtgtgtgcccgtctgttgtgtgactctggtaactagagatccctcagacccttttagtcagtgtggaaaatctctagcagtggcgcccgaacagggacttgaaagcgaaagggaaaccagaggagctctctcgacgcaggactcggcttgctgaagcgcgcacggcaagaggcgaggggcggcgactggtgagtacgccaaaaattttgactagcggaggctagaaggagagagatgggtgcgagagcgtcagtattaagcgggggagaattagatcgcgatgggaaaaaattcggttaaggccagggggaaagaaaaaatataaattaaaacatatagtatgggcaagcagggagctagaacgattcgcagttaatcctggcctgttagaaacatcagaaggctgtagacaaatactgggacagctacaaccatcccttcagacaggatcagaagaacttagatcattatataatacagtagcaaccctctattgtgtgcatcaaaggatagagataaaagacaccaaggaagctttagacaagatagaggaagagcaaaacaaaagtaagaccaccgcacagcaagcggccgctgatcttcagacctggaggaggagatatgagggacaattggagaagtgaattatataaatataaagtagtaaaaattgaaccattaggagtagcacccaccaaggcaaagagaagagtggtgcagagagaaaaaagagcagtgggaataggagctttgttccttgggttcttgggagcagcaggaagcactatgggcgcagcgtcaatgacgctgacggtacaggccagacaattattgtctggtatagtgcagcagcagaacaatttgctgagggctattgaggcgcaacagcatctgttgcaactcacagtctggggcatcaagcagctccaggcaagaatcctggctgtggaaagatacctaaaggatcaacagctcctggggatttggggttgctctggaaaactcatttgcaccactgctgtgccttggaatgctagttggagtaataaatctctggaacagatttggaatcacacgacctggatggagtgggacagagaaattaacaattacacaagcttaatacactccttaattgaagaatcgcaaaaccagcaagaaaagaatgaacaagaattattggaattagataaatgggcaagtttgtggaattggtttaacataacaaattggctgtggtatataaaattattcataatgatagtaggaggcttggtaggtttaagaatagtttttgctgtactttctatagtgaatagagttaggcagggatattcaccattatcgtttcagacccacctcccaaccccgaggggacccgacaggcccgaaggaatagaagaagaaggtggagagagagacagagacagatccattcgattagtgaacggatctcgacggtatcggttaacttttaaaagaaaaggggggattggggggtacagtgcaggggaaagaatagtagacataatagcaacagacatacaaactaaagaattacaaaaacaaattacaaaattcaaaattttatcgatgcctccccgtcaccaccccccccaacccgccccgaccggagctgagagtaattcatacaaaaggactcgcccctgccttggggaatcccagggaccgtcgttaaactcccactaacgtagaacccagagatcgctgcgttcccgccccctcacccgcccgctctcgtcatcactgaggtggagaagagcatgcgtgaggctccggtgcccgtcagtgggcagagcgcacatcgcccacagtccccgagaagttggggggaggggtcggcaattgaaccggtgcctagagaaggtggcgcggggtaaactgggaaagtgatgtcgtgtactggctccgcctttttcccgagggtgggggagaaccgtatataagtgcagtagtcgccgtgaacgttctttttcgcaacgggtttgccgccagaacacaggtaagtgccgtgtgtggttcccgcgggcctggcctctttacgggttatggcccttgcgtgccttgaattacttccacgcccctggctgcagtacgtgattcttgatcccgagcttcgggttggaagtgggtgggagagttcgaggccttgcgcttaaggagccccttcgcctcgtgcttgagttgaggcctggcctgggcgctggggccgccgcgtgcgaatctggtggcaccttcgcgcctgtctcgctgctttcgataagtctctagccatttaaaatttttgatgatatcctgcgacgctttttttctggcaagatagtcttgtaaatgcgggccaagatctgcacactggtatttcggtttttggggccgcgggcggcgacggggcccgtgcgtcccagcgcacatgttcggcgaggcggggcctgcgagcgcggccaccgagaatcggacgggggtagtctcaagctggccggcctgctctggtgcctggcctcgcgccgccgtgtatcgccccgccctgggcggcaaggctggcccggtcggcaccagttgcgtgagcggaaagatggccgcttcccggccctgctgcagggagctcaaaatggaggacgcggcgctcgggagagcgggcgggtgagtcacccacacaaaggaaaagggcctttccgtcctcagccgtcgcttcatgtgactccacggagtaccgggcgccgtccaggcacctcgattagttctcgagcttttggagtacgtcgtctttaggttggggggaggggttttatgcgatggagtttccccacactgagtgggtggagactgaagttaggccagcttggcacttgatgtaattctccttggaatttgccctttttgagtttggatcttggttcattctcaagcctcagacagtggttcaaagtttttttcttccatttcaggtgtcgtgaaaactacccctctagacccgggccaccatgccggtgcagctgacgacagccctgcgtgtggtgggcaccagcctgtttgccctggcagtgctgggtggcatcctggcagcctatgtgacgggctaccagttcatccacacggaaaagcactacctgtccttcggcctgtacggcgccatcctgggcctgcacctgctcattcagagcctgtttgccttcctggagcaccggcgcatgcgacgtgccggccaggccctgaagctgccctccccgcggcggggctcggtggcactgtgcattgccgcataccaggaggaccctgactacttgcgcaagtgcctgcgctcggcccagcgcatctccttccctgacctcaaggtggtcatggtggtggatggcaaccgccaggaggacgcctacatgctggacatcttccacgaggtgctgggcggcaccgagcaggccggcttctttgtgtggcgcagcaacttccatgaggcaggcgagggtgagacggaggccagcctgcaggagggcatggaccgtgtgcgggatgtggtgcgggccagcaccttctcgtgcatcatgcagaagtggggaggcaagcgcgaggtcatgtacacggccttcaaggccctcggcgattcggtggactacatccaggtgtgcgactctgacactgtgctggatccagcctgcaccatcgagatgcttcgagtcctggaggaggatccccaagtagggggagtcgggggagatgtccagatcctcaacaagtacgactcatggatttccttcctgagcagcgtgcggtactggatggccttcaacgtggagcgggcctgccagtcctactttggctgtgtgcagtgtattagtgggcccttgggcatgtaccgcaacagcctcctccagcagttcctggaggactggtaccatcagaagttcctaggcagcaagtgcagcttcggggatgaccggcacctcaccaaccgagtcctgagccttggctaccgaactaagtataccgcgcgctccaagtgcctcacagagacccccactaagtacctccggtggctcaaccagcaaacccgctggagcaagtcttacttccgggagtggctctacaactctctgtggttccataagcaccacctctggatgacctacgagtcagtggtcacgggtttcttccccttcttcctcattgccacggttatacagcttttctaccggggccgcatctggaacattctcctcttcctgctgacggtgcagctggtgggcattatcaaggccacctacgcctgcttccttcggggcaatgcagagatgatcttcatgtccctctactccctcctctatatgtccagccttctgccggccaagatctttgccattgctaccatcaacaaatctggctggggcacctctggccgaaaaaccattgtggtgaacttcattggcctcattcctgtgtccatctgggtggcagttctcctgggagggctggcctacacagcttattgccaggacctgttcagtgagacagagctagccttccttgtctctggggctatactgtatggctgctactgggtggccctcctcatgctatatctggccatcatcgcccggcgatgtgggaagaagccggagcagtacagcttggcttttgctgaggtgtagacgcgtctccggcctagggataacagggtaatccgctagcccctctccctcccccccccctaacgttactggccgaagccgcttggaataaggccggtgtgcgtttgtctatatgttattttccaccatattgccgtcttttggcaatgtgagggcccggaaacctggccctgtcttcttgacgagcattcctaggggtctttcccctctcgccaaaggaatgcaaggtctgttgaatgtcgtgaaggaagcagttcctctggaagcttcttgaagacaaacaacgtctgtagcgaccctttgcaggcagcggaaccccccacctggcgacaggtgcctctgcggccaaaagccacgtgtataagatacacctgcaaaggcggcacaaccccagtgccacgttgtgagttggatagttgtggaaagagtcaaatggctctcctcaagcgtattcaacaaggggctgaaggatgcccagaaggtaccccattgtatgggatctgatctggggcctcggtacacatgctttacatgtgtttagtcgaggttaaaaaaacgtctaggccccccgaaccacggggacgtggttttcctttgaaaaacacgatgataatatggccacactagagatccaccggtcgccaccatgaaaaagcctgaactcaccgcgacgtctgtcgagaagtttctgatcgaaaagttcgacagcgtctccgacctgatgcagctctcggagggcgaagaatctcgtgctttcagcttcgatgtaggagggcgtggatatgtcctgcgggtaaatagctgcgccgatggtttctacaaagatcgttatgtttatcggcactttgcatcggccgcgctcccgattccggaagtgcttgacattggggaattcagcgagagcctgacctattgcatctcccgccgtgcacagggtgtcacgttgcaagacctgcctgaaaccgaactgcccgctgttctgcagccggtcgcggaggccatggatgcgatcgctgcggccgatcttagccagacgagcgggttcggcccattcggaccgcaaggaatcggtcaatacactacatggcgtgatttcatatgcgcgattgctgatccccatgtgtatcactggcaaactgtgatggacgacaccgtcagtgcgtccgtcgcgcaggctctcgatgagctgatgctttgggccgaggactgccccgaagtccggcacctcgtgcacgcggatttcggctccaacaatgtcctgacggacaatggccgcataacagcggtcattgactggagcgaggcgatgttcggggattcccaatacgaggtcgccaacatcttcttctggaggccgtggttggcttgtatggagcagcagacgcgctacttcgagcggaggcatccggagcttgcaggatcgccgcggctccgggcgtatatgctccgcattggtcttgaccaactctatcagagcttggttgacggcaatttcgatgatgcagcttgggcgcagggtcgatgcgacgcaatcgtccgatccggagccgggactgtcgggcgtacacaaatcgcccgcagaagcgcggccgtctggaccgatggctgtgtagaagtactcgccgatagtggaaaccgacgccccagcactcgtccgagggcaaaggaataggcggccgcgtcgacaatcaacctctggattacaaaatttgtgaaagattgactggtattcttaactatgttgctccttttacgctatgtggatacgctgctttaatgcctttgtatcatgctattgcttcccgtatggctttcattttctcctccttgtataaatcctggttgctgtctctttatgaggagttgtggcccgttgtcaggcaacgtggcgtggtgtgcactgtgtttgctgacgcaacccccactggttggggcattgccaccacctgtcagctcctttccgggactttcgctttccccctccctattgccacggcggaactcatcgccgcctgccttgcccgctgctggacaggggctcggctgttgggcactgacaattccgtggtgttgtcggggaagctgacgtcctttccatggctgctcgcctgtgttgccacctggattctgcgcgggacgtccttctgctacgtcccttcggccctcaatccagcggaccttccttcccgcggcctgctgccggctctgcggcctcttccgcgtcttcgccttcgccctcagacgagtcggatctccctttgggccgcctccccgcctggaattcgagctcggtacctttaagaccaatgacttacaaggcagctgtagatcttagccactttttaaaagaaaaggggggactggaagggctaattcactcccaacgaagacaagatctgctttttgcttgtactgggtctctctggttagaccagatctgagcctgggagctctctggctaactagggaacccactgcttaagcctcaataaagcttgccttgagtgcttcaagtagtgtgtgcccgtctgttgtgtgactctggtaactagagatccctcagacccttttagtcagtgtggaaaatctctagcagtagtagttcatgtcatcttattattcagtatttataacttgcaaagaaatgaatatcagagagtgagaggaacttgtttattgcagcttataatggttacaaataaagcaatagcatcacaaatttcacaaataaagcatttttttcactgcattctagttgtggtttgtccaaactcatcaatgtatcttatcatgtctggctctagctatcccgcccctaactccgcccatcccgcccctaactccgcccagttccgcccattctccgccccatggctgactaattttttttatttatgcagaggccgaggccgcctcggcctctgagctattccagaagtagtgaggaggcttttttggaggcctagggacgtacccaattcgccctatagtgagtcgtattacgcgcgctcactggccgtcgttttacaacgtcgtgactgggaaaaccctggcgttacccaacttaatcgccttgcagcacatccccctttcgccagctggcgtaatagcgaagaggcccgcaccgatcgcccttcccaacagttgcgcagcctgaatggcgaatgggacgcgccctgtagcggcgcattaagcgcggcgggtgtggtggttacgcgcagcgtgaccgctacacttgccagcgccctagcgcccgctcctttcgctttcttcccttcctttctcgccacgttcgccggctttccccgtcaagctctaaatcgggggctccctttagggttccgatttagtgctttacggcacctcgaccccaaaaaacttgattagggtgatggttcacgtagtgggccatcgccctgatagacggtttttcgccctttgacgttggagtccacgttctttaatagtggactcttgttccaaactggaacaacactcaaccctatctcggtctattcttttgatttataagggattttgccgatttcggcctattggttaaaaaatgagctgatttaacaaaaatttaacgcgaattttaacaaaatattaacgcttacaatttaggtggcacttttcggggaaatgtgcgcggaacccctatttgtttatttttctaaatacattcaaatatgtatccgctcatgagacaataaccctgataaatgcttcaataatattgaaaaaggaagagtatgagtattcaacatttccgtgtcgcccttattcccttttttgcggcattttgccttcctgtttttgctcacccagaaacgctggtgaaagtaaaagatgctgaagatcagttgggtgcacgagtgggttacatcgaactggatctcaacagcggtaagatccttgagagttttcgccccgaagaacgttttccaatgatgagcacttttaaagttctgctatgtggcgcggtattatcccgtattgacgccgggcaagagcaactcggtcgccgcatacactattctcagaatgacttggttgagtactcaccagtcacagaaaagcatcttacggatggcatgacagtaagagaattatgcagtgctgccataaccatgagtgataacactgcggccaacttacttctgacaacgatcggaggaccgaaggagctaaccgcttttttgcacaacatgggggatcatgtaactcgccttgatcgttgggaaccggagctgaatgaagccataccaaacgacgagcgtgacaccacgatgcctgtagcaatggcaacaacgttgcgcaaactattaactggcgaactacttactctagcttcccggcaacaattaatagactggatggaggcggataaagttgcaggaccacttctgcgctcggcccttccggctggctggtttattgctgataaatctggagccggtgagcgtgggtctcgcggtatcattgcagcactggggccagatggtaagccctcccgtatcgtagttatctacacgacggggagtcaggcaactatggatgaacgaaatagacagatcgctgagataggtgcctcactgattaagcattggtaactgtcagaccaagtttactcatatatactttagattgatttaaaacttcatttttaatttaaaaggatctaggtgaagatcctttttgataatctcatgaccaaaatcccttaacgtgagttttcgttccactgagcgtcagaccccgtagaaaagatcaaaggatcttcttgagatcctttttttctgcgcgtaatctgctgcttgcaaacaaaaaaaccaccgctaccagcggtggtttgtttgccggatcaagagctaccaactctttttccgaaggtaactggcttcagcagagcgcagataccaaatactgttcttctagtgtagccgtagttaggccaccacttcaagaactctgtagcaccgcctacatacctcgctctgctaatcctgttaccagtggctgctgccagtggcgataagtcgtgtcttaccgggttggactcaagacgatagttaccggataaggcgcagcggtcgggctgaacggggggttcgtgcacacagcccagcttggagcgaacgacctacaccgaactgagatacctacagcgtgagctatgagaaagcgccacgcttcccgaagggagaaaggcggacaggtatccggtaagcggcagggtcggaacaggagagcgcacgagggagcttccagggggaaacgcctggtatctttatagtcctgtcgggtttcgccacctctgacttgagcgtcgatttttgtgatgctcgtcaggggggcggagcctatggaaaaacgccagcaacgcggcctttttacggttcctggccttttgctggccttttgctcacatgttctttcctgcgttatcccctgattctgtggataaccgtattaccgcctttgagtgagctgataccgctcgccgcagccgaacgaccgagcgcagcgagtcagtgagcgaggaagcggaagagcgcccaatacgcaaaccgcctctccccgcgcgttggccgattcattaatgcagctggcacgacaggtttcccgactggaaagcgggcagtgagcgcaacgcaattaatgtgagttagctcactcattaggcaccccaggctttacactttatgcttccggctcgtatgttgtgtggaattgtgagcggataacaatttcacacaggaaacagctatgaccatgattacgccaagcgcgcaattaaccctcactaaagggaacaaaagctggagctgc

SEQ ID NO: 214 - protein, 10 aa, Artificial sequence
  C-terminal PIIINP neo-epitope sequence
  misc_feature (5): Xaa can be Pro or Gly
CPTGXQNYSP

SEQ ID NO: 215 - protein, 12 aa, Artificial sequence
  C-terminal elongation of SEQ ID NO: 214
  misc_feature (5): Xaa can be Pro or Gly
  misc_feature (12): Xaa can be absent or can be one or more amino acids of the sequence of collagen type III
CPTGXQNYSPQX

SEQ ID NO: 216 - protein, 10 aa, Artificial sequence
  PIIINP C-terminal selection peptide sequence
CPTGPQNYSP

SEQ ID NO: 217 - protein, 10 aa, Rodentia sp.
  Rodent PIIINP neo-epitope C-terminal sequence
CPTGGQNYSP

SEQ ID NO: 218 - protein, 9 aa, Artificial Sequence
  Human C-terminal PIIINP neo-epitope sequence
  misc_feature (5): Xaa can be Pro or Gly
CPTGXQNYS

SEQ ID NO: 219 - protein, 13 aa, Artificial Sequence
  Modified C-terminal PIIINP peptide
  misc_feature (1)...(3): Xaa Xaa Xaa is absent or is a biotinylated-Cys Gly Gly linker
  misc_feature (4): Cys is biotinylated if Xaa Xaa Xaa is absent
XXXCPTGPQNYSP

SEQ ID NO: 220 - protein, 13 aa, Artificial Sequence
  modified PIIINP C-terminal immunogenic peptide with linker
  misc_feature (1)...(3): N-terminal linker sequence
  misc_feature (1): Cys has N-terminal bound ovalbumin
CGGCPTGPQNYSP

SEQ ID NO: 221 - protein, 13 aa, Artificial Sequence
  modified PIIINP C-terminal screening peptide with linker
  misc_feature (1)...(3): N-terminal linker sequence
  misc_feature (1): Cys has N-terminal bound biotin
CGGCPTGPQNYSP

SEQ ID NO: 222 - protein, 10 aa, Artificial Sequence
  Non-sense peptide for ELISA
GSPGKDGVRG

SEQ ID NO: 223 - protein, 11 aa, Artificial Sequence
  C-terminal elongation of SEQ ID NO: 216
  144-153 of SEQ ID NO: 227
CPTGPQNYSPQ

SEQ ID NO: 224 - protein, 179 aa, Homo sapiens
  Human PIIINP alpha1 chain sequence
MMSFVQKGSWLLLALLHPTIIIAQQFAVEGGCSHLGQSYADRDVWKPEPCQICVCDSGSVLCDDIICDDQELDCPNPEIPFGECCAVCPQPPTAPTRPPNGQGPQGPKGDPGPPGIPGRNGDPGIPGQPGSPGSPGPPGICFSCPTGPQNYSPQYDSYDVKSGVAVGGLAGYPGPAGPP

SEQ ID NO: 225 - protein, 178 aa, Rodentia sp.
  Rat PIIINP alpha1 chain sequence
MMSFVQCGTWFLLTLLHPSLIIAQQSNVDELGCNYLGQSYESRDVWKPEPCQICVCDSGSVLCDDIMCDDEPLDCPNPEIPFGECCAICPQPSTPAPVIPDGNRPQGPKGDPGPPGIPGRNGDPGLPGQPGLPGPPGSPGICESCPTGGQNYSPQFDSYDVKSGVGGMGGVPGPAGPP

SEQ ID NO: 226 - protein, 10 aa, Homo sapiens
  Human PIIINP alpha1 chain sequence (aa 610-619)
KNGETGPQGP

SEQ ID NO: 227 - protein, 1466 aa, Homo sapiens
  Human collagen alpha-1(III) chain protein
  DOMAIN (1)...(23): signal peptide
  DOMAIN (24)...(153): N-terminal propeptide
  DOMAIN (154)...(1221): mature Type III alpha-1 chain
  DOMAIN (1222)...(1466): C-terminal propeptide
MMSFVQKGSWLLLALLHPTIILAQQEAVEGGCSHLGQSYADRDVWKPEPCQICVCDSGSVLCDDIICDDQELDCPNPEIPFGECCAVCPQPPTAPTRPPNGQGPQGPKGDPGPPGIPGRNGDPGIPGQPGSPGSPGPPGICESCPTGPQNYSPQYDSYDVKSGVAVGGLAGYPGPAGPPGPPGPPGTSGHPGSPGSPGYQGPPGEPGQAGPSGPPGPPGAIGPSGPAGKDGESGRPGRPGERGLPGPPGIKGPAGIPGFPGMKGHRGFDGRNGEKGETGAPGLKGENGLPGENGAPGPMGPRGAPGERGRPGLPGAAGARGNDGARGSDGQPGPPGPPGTAGFPGSPGAKGEVGPAGSPGSNGAPGQRGEPGPQGHAGAQGPPGPPGINGSPGGKGEMGPAGIPGAPGLMGARGPPGPAGANGAPGLRGGAGEPGKNGAKGEPGPRGERGEAGIPGVPGAKGEDGKDGSPGEPGANGLPGAAGERGAPGFRGPAGPNGIPGEKGPAGERGAPGPAGPRGAAGEPGRDGVPGGPGMRGMPGSPGGPGSDGKPGPPGSQGESGRPGPPGPSGPRGQPGVMGFPGPKGNDGAPGKNGERGGPGGPGPQGPPGKNGETGPQGPPGPTGPGGDKGDTGPPGPQGLQGLPGTGGPPGENGKPGEPGPKGDAGAPGAPGGKGDAGAPGERGPPGLAGAPGLRGGAGPPGPEGGKGAAGPPGPPGAAGTPGLQGMPGERGGLGSPGPKGDKGEPGGPGADGVPGKDGPRGPTGPIGPPGPAGQPGDKGEGGAPGLPGIAGPRGSPGERGETGPPGPAGFPGAPGQNGEPGGKGERGAPGEKGEGGPPGVAGPPGGSGPAGPPGPQGVKGERGSPGGPGAAGFPGARGLPGPPGSNGNPGPPGPSGSPGKDGPPGPAGNTGAPGSPGVSGPKGDAGQPGEKGSPGAQGPPGAPGPLGIAGITGARGLAGPPGMPGPRGSPGPQGVKGESGKPGANGLSGERGPPGPQGLPGLAGTAGEPGRDGNPGSDGLPGRDGSPGGKGDRGENGSPGAPGAPGHPGPPGPVGPAGKSGDRGESGPAGPAGAPGPAGSRGAPGPQGPRGDKGETGERGAAGIKGHRGFPGNPGAPGSPGPAGQQGAIGSPGPAGPRGPVGPSGPPGKDGTSGHPGPIGPPGPRGNRGERGSEGSPGHPGQPGPPGPPGAPGPCCGGVGAAAIAGIGGEKAGGFAPYYGDEPMDFKINTDEIMTSLKSVNGQIESLISPDGSRKNPARNCRDLKFCHPELKSGEYWVDPNQGCKLDAIKVFCNMETGETCISANPLNVPRKHWWTDSSAEKKHVWFGESMDGGFQFSYGNPELPEDVLDVHLAFLRLLSSRASQNITYHCKNSIAYMDQASGNVKKALKLMGSNEGEFKAEGNSKFTYTVLEDGCTKHTGEWSKTVFEYRTRKAVRLPIVDIAPYDIGGPDQEFGVDVGPVCFL

SEQ ID NO: 228 - protein, 12 aa, Artificial Sequence
  C-terminal elongation of SEQ ID NO: 223
  misc_feature (12): Xaa can be Glu or Gln
CPTGPQNYSPQX

SEQ ID NO: 229 - protein, 9 aa, Artificial Sequence
  Pro -C3 neo-epitope
PTGPQNYSP

SEQ ID NO: 230 - protein, 12 aa, Homo sapiens
  Human PIIINP alpha1 chain sequence (aa 608-619)
PGKNGETGPQGP

SEQ ID NO: 231 - protein, 9 aa, Artificial sequence
  shortened version of a C-terminal neo-epitope of Human PIIINP
CPTGPQNYS

SEQ ID NO: 232 - protein, 8 aa, Homo sapiens
KNGETGPQ

SEQ ID NO: 233 - protein, 13 aa, Homo sapiens
KNGETGPQGPGGC

SEQ ID NO: 234 - protein, 13 aa, Homo sapiens
KNGETGPQGPGGC

SEQ ID NO: 235 - protein, 13 aa, Homo sapiens
KNGETGPQGPPGK

SEQ ID NO: 236 - protein, 13 aa, Homo sapiens
KDGETGAAGPPGK

SEQ ID NO: 237 - protein, 13 aa, Homo sapiens
KDGEAGAQGPPGK

SEQ ID NO: 238 - protein, 10 aa, Homo sapiens
  Pro-C6 neo-epitope
KPGVISVMGT

SEQ ID NO: 239 - protein, 10 aa, Homo sapiens
  VCANM neo-epitope
KTFGKMKPRY

SEQ ID NO: 240 - protein, 10 aa, Homo sapiens
  C8-C neo-epitope
SFSGYLLYPM

SEQ ID NO: 241 - protein, 3177 aa, Homo sapiens
  Collagen alpha-3(VI) chain
MRKHRHLPLVAVFCLFLSGFPTTHAQQQQADVKNGAAADIIFLVDSSWTIGEEHFQLVREFLYDVVKSLAVGENDFHFALVQFNGNPHTEFLLNTYRTKQEVLSHISNMSYIGGTNQTGKGLEYIMQSHLTKAAGSRAGDGVPQVIVVLTDGHSKDGLALPSAELKSADVNVFAIGVEDADEGALKEIASEPLNMHMFNLENFTSLHDIVGNLVSCVHSSVSPERAGDTETLKDITAQDSADIIFLIDGSNNTGSVNFAVILDFLVNLLEKLPIGTQQIRVGVVQFSDEPRTMFSLDTYSTKAQVLGAVKALGFAGGELANIGLALDFVVENHFTRAGGSRVEEGVPQVLVLISAGPSSDEIRYGVVALKQASVFSFGLGAQAASRAELQHIATDDNLVFTVPEFRSFGDLQEKLLPYIVGVAQRHIVLKPPTIVTQVIEVNKRDIVFLVDGSSALGLANFNAIRDFIAKVIQRLEIGQDLIQVAVAQYADTVRPEFYFNTHPTKREVITAVRKMKPLDGSALYTGSALDFVRNNLFTSSAGYRAAEGIPKLLVLITGGKSLDEISQPAQELKRSSIMAFAIGNKGADQAELEEIAFDSSLVFIPAEFRAAPLQGMLPGLLAPLRTLSGTPEVHSNKRDIIFLLDGSANVGKTNFPYVRDFVMNLVNSLDIGNDNIRVGLVQFSDTPVTEFSLNTYQTKSDILGHLRQLQLQGGSGLNTGSALSYVYANHFTEAGGSRIREHVPQLLLLLTAGQSEDSYLQAANALTRAGILTFCVGASQANKAELEQIAFNPSLVYLMDDFSSLPALPQQLIQPLTTYVSGGVEEVPLAQPESKRDILFLFDGSANLVGQFPVVRDFLYKIIDELNVKPEGTRIAVAQYSDDVKVESRFDEHQSKPEILNLVKRMKIKTGKALNLGYALDYAQRYIFVKSAGSRIEDGVLQFLVLLVAGRSSDRVDGPASNLKQSGVVPFIFQAKNADPAELEQIVLSPAFILAAESLPKIGDLHPQIVNLLKSVHNGAPAPVSGEKDVVFLLDGSEGVRSGFPLLKEFVQRVVESLDVGQDRVRVAVVQYSDRTRPEFYLNSYMNKQDVVNAVRQLTLLGGPTPNTGAALEFVLRNILVSSAGSRITEGVPQLLIVLTADRSGDDVRNPSVVVKRGGAVPIGIGIGNADITEMQTISFIPDFAVAIPTFRQLGTVQQVISERVTQLTREELSRLQPVLQPLPSPGVGGKRDVVFLIDGSQSAGPEFQYVRTLIERLVDYLDVGFDTTRVAVIQFSDDPKVEFLLNAHSSKDEVQNAVQRLRPKGGRQINVGNALEYVSRNIFKRPLGSRIEEGVPQFLVLISSGKSDDEVDDPAVELKQFGVAPFTIARNADQEELVKISLSPEYVFSVSTFRELPSLEQKLLTPITTLTSEQIQKLLASTRYPPPAVESDAADIVFLIDSSEGVRPDGFAHIRDFVSRIVRRLNIGPSKVRVGVVQFSNDVFPEFYLKTYRSQAPVLDAIRRLRLRGGSPLNTGKALEFVARNLFVKSAGSRIEDGVPQHLVLVLGGKSQDDVSRFAQVIRSSGIVSLGVGDRNIDRTELQTITNDPRLVFTVREFRELPNIEERIMNSFGPSAATPAPPGVDTPPPSRPEKKKADIVFLLDGSINFRRDSFQEVLRFVSEIVDTVYEDGDSIQVGLVQYNSDPTDEFFLKDFSTKRQIIDAINKVVYKGGRHANTKVGLEHLRVNHFVPEAGSRLDQRVPQIAFVITGGKSVEDAQDVSLALTQRGVKVFAVGVRNIDSEEVGKIASNSATAFRVGNVQELSELSEQVLETLHDAMHETLCPGVTDAAKACNLDVILGFDGSRDQNVFVAQKGFESKVDAILNRISQMHRVSCSGGRSPTVRVSVVANTPSGPVEAFDFDEYQPEMLEKFRNMRSQHPYVLTEDTLKVYLNKFRQSSPDSVKVVIHFTDGADGDLADLHRASENLRQEGVRALILVGLERVVNLERLMHLEFGRGFMYDRPLRLNLLDLDYELAEQLDNIAEKACCGVPCKCSGQRGDRGPIGSIGPKGIPGEDGYRGYPGDEGGPGERGPPGVNGTQGFQGCPGQRGVKGSRGFPGEKGEVGEIGLDGLDGEDGDKGLPGSSGEKGNPGRRGDKGPRGEKGERGDVGIRGDPGNPGQDSQERGPKGETGDLGPMGVPGRDGVPGGPGETGKNGGFGRRGPPGAKGNKGGPGQPGFEGEQGTRGAQGPAGPAGPPGLIGEQGISGPRGSGGAAGAPGERGRTGPLGRKGEPGEPGPKGGIGNRGPRGETGDDGRDGVGSEGRRGKKGERGFPGYPGPKGNPGEPGLNGTTGPKGIRGRRGNSGPPGIVGQKGDPGYPGPAGPKGNRGDSIDQCALIQSIKDKCPCCYGPLECPVFPTELAFALDTSEGVNQDTFGRMRDVVLSIVNDLTIAESNCPRGARVAVVTYNNEVTTEIRFADSKRKSVLLDKIKNLQVALTSKQQSLETAMSFVARNTFKRVRNGFLMRKVAVFFSNTPTRASPQLREAVLKLSDAGITPLFLTRQEDRQLINALQINNTAVGHALVLPAGRDLTDFLENVLTCHVCLDICNIDPSCGFGSWRPSFRDRRAAGSDVDIDMAFILDSAETTTLFQFNEMKKYIAYLVRQLDMSPDPKASQHFARVAVVQHAPSESVDNASMPPVKVEFSLTDYGSKEKLVDFLSRGMTQLQGTRALGSAIEYTIENVFESAPNPRDLKIVVLMLTGEVPEQQLEEAQRVILQAKCKGYFFVVLGIGRKVNIKEVYTFASEPNDVFFKLVDKSTELNEEPLMRFGRLLPSFVSSENAFYLSPDIRKQCDWFQGDQPTKNLVKFGHKQVNVPNNVTSSPTSNPVTTTKPVTTTKPVTTTTKPVTTTTKPVTIINQPSVKPAAAKPAPAKPVAAKPVATKMATVRPPVAVKPATAAKPVAAKPAAVRPPAAAAAKPVATKPEVPRPQAAKPAATKPATTKPMVKMSREVQVFEITENSAKLHWERAEPPGPYFYDLTVTSAHDQSLVLKQNLTVTDRVIGGLLAGQTYHVAVVCYLRSQVRATYHGSFSTKKSQPPPPQPARSASSSTINLMVSTEPLALTETDICKLPKDEGTCRDFILKWYYDPNTKSCARFWYGGCGGNENKFGSQKECEKVCAPVLAKPGVISVMGT

SEQ ID NO: 242 - protein, 744 aa, Homo sapiens
  Collagen alpha-1(VIII) chain
MAVLPGPLQLLGVLLTISLSSIRLIQAGAYYGIKPLPPQIPPQMPPQIPQYQPLGQQVPHMPLAKDGLAMGKEMPHLQYGKEYPHLPQYMKEIQPAPRMGKEAVPKKGKEIPLASLRGEQGPRGEPGPRGPPGPPGLPGHGIPGIKGKPGPQGYPGVGKPGMPGMPGKPGAMGMPGAKGEIGQKGEIGPMGIPGPQGPPGPHGLPGIGKPGGPGLPGQPGPKGDRGPKGLPGPQGLRGPKGDKGFGMPGAPGVKGPPGMHGPPGPVGLPGVGKPGVTGFPGPQGPLGKPGAPGEPGPQGPIGVPGVQGPPGIPGIGKPGQDGIPGQPGFPGGKGEQGLPGLPGPPGLPGIGKPGFPGPKGDRGMGGVPGALGPRGEKGPIGAPGIGGPPGEPGLPGIPGPMGPPGAIGFPGPKGEGGIVGPQGPPGPKGEPGLQGFPGKPGFLGEVGPPGMRGLPGPIGPKGEAGQKGVPGLPGVPGLLGPKGEPGIPGDQGLQGPPGIPGIGGPSGPIGPPGIPGPKGEPGLPGPPGFPGIGKPGVAGLHGPPGKPGALGPQGQPGLPGPPGPPGPPGPPAVMPPTPPPQGEYLPDMGLGIDGVKPPHAYGAKKGKNGGPAYEMPAFTAELTAPFPPVGAPVKFNKLLYNGRQNYNPQTGIFTCEVPGVYYFAYHVHCKGGNVWVALFKNNEPVMYTYDEYKKGFLDQASGSAVLLLRPGDRVFLQMPSEQAAGLYAGQYVHSSFSGYLLYPM

SEQ ID NO: 243 - protein, 3396 aa, Homo sapiens
  Versican core protein
MFINIKSILWMCSTLIVTHALHKVKVGKSPPVRGSLSGKVSLPCHFSTMPTLPPSYNTSEFLRIKWSKIEVDKNGKDLKETTVLVAQNGNIKIGQDYKGRVSVPTHPEAVGDASLTVVKLLASDAGLYRCDVMYGIEDTQDTVSLTVDGVVFHYRAATSRYTLNFEAAQKACLDVGAVIATPEQLFAAYEDGFEQCDAGWLADQTVRYPIRAPRVGCYGDKMGKAGVRTYGFRSPQETYDVYCYVDHLDGDVFHLTVPSKFTFEEAAKECENQDARLATVGELQAAWRNGFDQCDYGWLSDASVRHPVTVARAQCGGGLLGVRTLYRFENQTGFPPPDSRFDAYCFKPKEATTIDLSILAETASPSLSKEPQMVSDRTTPIIPLVDELPVIPTEFPPVGNIVSFEQKATVQPQAITDSLATKLPTPTGSTKKPWDMDDYSPSASGPLGKLDISEIKEEVLQSTTGVSHYATDSWDGVVEDKQTQESVTQIEQIEVGPLVTSMEILKHIPSKEFPVTETPLVTARMILESKTEKKMVSTVSELVTTGHYGFTLGEEDDEDRTLTVGSDESTLIFDQIPEVITVSKTSEDTIHTHLEDLESVSASTTVSPLIMPDNNGSSMDDWEERQTSGRITEEFLGKYLSTTPFPSQHRTEIELFPYSGDKILVEGISTVIYPSLQTEMTHRRERTETLIPEMRTDTYTDEIQEEITKSPFMGKTEEEVFSGMKLSTSLSEPIHVTESSVEMTKSFDFPTLITKLSAEPTEVRDMEEDFTATPGTTKYDENITTVLLAHGTLSVEAATVSKWSWDEDNTTSKPLESTEPSASSKLPPALLTTVGMNGKDKDIPSFTEDGADEFTLIPDSTQKQLEEVTDEDIAAHGKFTIRFQPTTSTGIAEKSTLRDSTTEEKVPPITSTEGQVYATMEGSALGEVEDVDLSKPVSTVPQFAHTSEVEGLAFVSYSSTQEPTTYVDSSHTIPLSVIPKTDWGVLVPSVPSEDEVLGEPSQDILVIDQTRLEATISPETMRTTKITEGTTQEEFPWKEQTAEKPVPALSSTAWTPKEAVTPLDEQEGDGSAYTVSEDELLTGSERVPVLETTPVGKIDHSVSYPPGAVTEHKVKTDEVVTLTPRIGPKVSLSPGPEQKYETEGSSTTGFTSSLSPFSTHITQLMEETTTEKTSLEDIDLGSGLFEKPKATELIEFSTIKVTVPSDITTAFSSVDRLHTTSAFKPSSAITKKPPLIDREPGEETTSDMVIIGESTSHVPPTTLEDIVAKETETDIDREYFTTSSPPATQPTRPPTVEDKEAFGPQALSTPQPPASTKFHPDINVYIIEVRENKTGRMSDLSVIGHPIDSESKEDEPCSEETDPVHDLMAEILPEFPDIIEIDLYHSEENEEEEEECANATDVTTTPSVQYINGKHLVTTVPKDPEAAEARRGQFESVAPSQNFSDSSESDTHPFVIAKTELSTAVQPNESTETTESLEVTWKPETYPETSEHFSGGEPDVFPTVPFHEEFESGTAKKGAESVTERDTEVGHQAHEHTEPVSLFPEESSGEIAIDQESQKIAFARATEVTFGEEVEKSTSVTYTPTIVPSSASAYVSEEEAVTLIGNPWPDDLLSTKESWVEATPRQVVELSGSSSIPITEGSGEAEEDEDTMFTMVTDLSQRNTTDTLITLDTSRIITESFFEVPATTIYPVSEQPSAKVVPTKFVSETDTSEWISSTTVEEKKRKEEEGTTGTASTFEVYSSTQRSDQLILPFELESPNVATSSDSGTRKSFMSLTTPTQSEREMTDSTPVFTETNTLENLGAQTTEHSSIHQPGVQEGLTTLPRSPASVFMEQGSGEAAADPETTTVSSFSLNVEYAIQAEKEVAGTLSPHVETTFSTEPTGLVLSTVMDRVVAENITQTSREIVISERLGEPNYGAEIRGFSTGFPLEEDFSGDFREYSTVSHPIAKEETVMMEGSGDAAFRDTQTSPSTVPTSVHISHISDSEGPSSTMVSTSAFPWEEFTSSAEGSGEQLVTVSSSVVPVLPSAVQKFSGTASSIIDEGLGEVGTVNEIDRRSTILPTAEVEGTKAPVEKEEVKVSGTVSTNFPQTIEPAKLWSRQEVNPVRQEIESETTSEEQIQEEKSFESPQNSPATEQTIFDSQTFTETELKTTDYSVLTTKKTYSDDKEMKEEDTSLVNMSTPDPDANGLESYTTLPEATEKSHFFLATALVTESIPAEHVVTDSPIKKEESTKHFPKGMRPTIQESDTELLFSGLGSGEEVLPTLPTESVNFTEVEQINNTLYPHTSQVESTSSDKIEDFNRMENVAKEVGPLVSQTDIFEGSGSVTSTTLIEILSDTGAEGPTVAPLPFSTDIGHPQNQTVRWAEEIQTSRPQTITEQDSNKNSSTAEINETTTSSTDFLARAYGFEMAKEFVTSAPKPSDLYYEPSGEGSGEVDIVDSFHTSATTQATRQESSTTFVSDGSLEKHPEVPSAKAVTADGFPTVSVMLPLHSEQNKSSPDPTSTLSNTVSYERSTDGSFQDRFREFEDSTLKPNRKKPTENIIIDLDKEDKDLILTITESTILEILPELTSDKNTIIDIDHTKPVYEDILGMQTDIDTEVPSEPHDSNDESNDDSTQVQEIYEAAVNLSLTEETFEGSADVLASYTQATHDESMTYEDRSQLDHMGFHFTTGIPAPSTETELDVLLPTATSLPIPRKSATVIPEIEGIKAEAKALDDMFESSTLSDGQAIADQSEIIPTLGQFERTQEEYEDKKHAGPSFQPEFSSGAEEALVDHTPYLSIATTHLMDQSVTEVPDVMEGSNPPYYTDTTLAVSTFAKLSSQTPSSPLTIYSGSEASGHTEIPQPSALPGIDVGSSVMSPQDSFKEIHVNIEATFKPSSEEYLHITEPPSLSPDTKLEPSEDDGKPELLEEMEASPTELIAVEGTEILQDFQNKTDGQVSGEAIKMFPTIKTPEAGTVITTADEIELEGATQWPHSTSASATYGVEAGVVPWLSPQTSERPTLSSSPEINPETQAALIRGQDSTIAASEQQVAARILDSNDQATVNPVEFNTEVATPPFSLLETSNETDFLIGINEESVEGTAIYLPGPDRCKMNPCLNGGTCYPTETSYVCTCVPGYSGDQCELDFDECHSNPCRNGATCVDGFNTFRCLCLPSYVGALCEQDTETCDYGWHKFQGQCYKYFAHRRTWDAAERECRLQGAHLTSILSHEEQMFVNRVGHDYQWIGLNDKMFEHDFRWTDGSTLQYENWRPNQPDSFFSAGEDCVVIIWHENGQWNDVPCNYHLTYTCKKGTVACGQPPVVENAKTFGKMKPRYEINSLIRYHCKDGFIQRHLPTIRCLGNGRWAIPKITCMNPSAYQRTYSMKYFKNSSSAKDNSINTSKHDHRWSRRWQESRR

SEQ ID NO: 244 - protein, 10 aa, Rattus norvegicus
  PIIINP neo-epitope
CPYGGEQYSP

SEQ ID NO: 245 - protein, 10 aa, Homo sapiens
  VCANM cleavage product
LLASDAGLYR

SEQ ID NO: 246 - protein, 12 aa, Homo sapiens
  VCANM cleavage product
LATVGELQAAWR

SEQ ID NO: 247 - protein, 13 aa, Homo sapiens
  VCANM cleavage product
ETTVLVAQNGNIK

SEQ ID NO: 248 - protein, 6 aa, Homo sapiens
  N terminal of a peptide fragment of versican
LLASDA

SEQ ID NO: 249 - protein, 6 aa, Homo sapiens
  N terminal of a peptide fragment of versican
LATVGE

SEQ ID NO: 250 - protein, 6 aa, Homo sapiens
  N terminal of a peptide fragment of versican
ETTVLV

SEQ ID NO: 251 - protein, 6 aa, Homo sapiens
  N terminal of a peptide fragment of versican
ENQDAR

SEQ ID NO: 252 - protein, 6 aa, Homo sapiens
  N terminal of a peptide fragment of versican
NGFDQC

SEQ ID NO: 253 - protein, 6 aa, Homo sapiens
  N terminal of a peptide fragment of versican
SLTVVK

SEQ ID NO: 254 - protein, 6 aa, Homo sapiens
  N terminal of a peptide fragment of versican
CDVMYG

SEQ ID NO: 255 - protein, 6 aa, Homo sapiens
  N terminal of a peptide fragment of versican
NGFDQC

SEQ ID NO: 256 - protein, 6 aa, Homo sapiens
  N terminal of a peptide fragment of versican
QNGINK

SEQ ID NO: 257 - protein, 6 aa, Homo sapiens
  N terminal of a peptide fragment of versican
IGQDYK

SEQ ID NO: 258 - protein, 10 aa, Homo sapiens
KDGETGAAGP

SEQ ID NO: 259 - protein, 13 aa, Homo sapiens
PGKNGETGPQGPK

SEQ ID NO: 260 - protein, 10 aa, Homo sapiens
KDGEAGAQGP

SEQ ID NO: 261 - protein, 11 aa, Homo sapiens
KPGVISVMGTA

SEQ ID NO: 262 - protein, 13 aa, Homo sapiens
  Pro-C6 neo-epitope
CGGKPGVISVMGT

SEQ ID NO: 263 - protein, 11 aa, Homo sapiens
KPGVISVMGTK

SEQ ID NO: 264 - protein, 9 aa, Homo sapiens
  truncated peptide
KPGVISVMG

SEQ ID NO: 265 - protein, 10 aa, Homo sapiens
  Pro-C8 neo-epitope
SFSGYLLYPM

SEQ ID NO: 266 - protein, 16 aa, Homo sapiens
  immunogenic peptide
KLHCGGSFSGYLLYPM

SEQ ID NO: 267 - protein, 11 aa, Homo sapiens
  elongated peptide
SFSGYLLYPMA

SEQ ID NO: 268 - protein, 13 aa, Homo sapiens
  screening peptide
CGGSFSGYLLYPM

SEQ ID NO: 269 - protein, 12 aa, Homo sapiens
KKKFSGYLLYPM

SEQ ID NO: 270 - protein, 13 aa, Homo sapiens
  CGG-VCANM neo-epitope
CGGKTFGKMKPRY

SEQ ID NO: 271 - protein, 11 aa, Homo sapiens
  VCANM neo-epitope-Lys
KTFGKMKPRYK

SEQ ID NO: 272 - protein, 11 aa, Homo sapiens
  elongated peptide
AKTFGKMKPRY

SEQ ID NO: 273 - protein, 394 aa, Artificial Sequence
  Alpha-1 antitrypsin variant (P357N)
EDPQGDAAQKTDTSHHDQDHPTFNKITPNLAEFAFSLYRQLAHQSNSTNIFFSPVSIATAFAMLSLGTKADTHDEILEGLNFNLTEIPEAQIHEGFQELLRTLNQPDSQLQLTTGNGLFLSEGLKLVDKFLEDVKKLYHSEAFTVNFGDTEEAKKQINDYVEKGTQGKIVDLVKELDRDTVFALVNYIFFKGKWERPFEVKDTEEEDFHVDQVTTVKVPMMKRLGMFNIQHCKKLSSWVLLMKYLGNATAIFFLPDEGKLQHLENELTHDIITKFLENEDRRSASLHLPKLSITGTYDLKSVLGQLGITKVFSNGADLSGVTEEAPLKLSKAVHKAVLTIDEKGTEAAGAMFLEAINMSIPPEVKFNKPFVFLMIDQNTKSPLFMGKVVNPTQK

SEQ ID NO: 274 - protein, 394 aa, Artificial Sequence
  A1AT_variant_P357N_S359T
EDPQGDAAQKTDTSHHDQDHPTFNKITPNLAEFAFSLYRQLAHQSNSTNIFFSPVSIATAFAMLSLGTKADTHDEILEGLNFNLTEIPEAQIHEGFQELLRTLNQPDSQLQLTTGNGLFLSEGLKLVDKFLEDVKKLYHSEAFTVNFGDTEEAKKQINDYVEKGTQGKIVDLVKELDRDTVFALVNYIFFKGKWERPFEVKDTEEEDFHVDQVTTVKVPMMKRLGMFNIQHCKKLSSWVLLMKYLGNATAIFFLPDEGKLQHLENELTHDIITKFLENEDRRSASLHLPKLSITGTYDLKSVLGQLGITKVFSNGADLSGVTEEAPLKLSKAVHKAVLTIDEKGTEAAGAMFLEAINMTIPPEVKFNKPFVFLMIDQNTKSPLFMGKVVNPTQK

SEQ ID NO: 275 - protein, 394 aa, Artificial Sequence
  A1AT_variant_P357N_C232S
EDPQGDAAQKTDTSHHDQDHPTFNKITPNLAEFAFSLYRQLAHQSNSTNIFFSPVSIATAFAMLSLGTKADTHDEILEGLNFNLTEIPEAQIHEGFQELLRTLNQPDSQLQLTTGNGLFLSEGLKLVDKFLEDVKKLYHSEAFTVNFGDTEEAKKQINDYVEKGTQGKIVDLVKELDRDTVFALVNYIFFKGKWERPFEVKDTEEEDFHVDQVTTVKVPMMKRLGMFNIQHSKKLSSWVLLMKYLGNATAIFFLPDEGKLQHLENELTHDIITKFLENEDRRSASLHLPKLSITGTYDLKSVLGQLGITKVFSNGADLSGVTEEAPLKLSKAVHKAVLTIDEKGTEAAGAMFLEAINMSIPPEVKFNKPFVFLMIDQNTKSPLFMGKVVNPTQK

SEQ ID NO: 276 - protein, 394 aa, Artificial Sequence
  A1AT_variant_P357N_S359T_C232S
EDPQGDAAQKTDTSHHDQDHPTFNKITPNLAEFAFSLYRQLAHQSNSTNIFFSPVSIATAFAMLSLGTKADTHDEILEGLNFNLTEIPEAQIHEGFQELLRTLNQPDSQLQLTTGNGLFLSEGLKLVDKFLEDVKKLYHSEAFTVNFGDTEEAKKQINDYVEKGTQGKIVDLVKELDRDTVFALVNYIFFKGKWERPFEVKDTEEEDFHVDQVTTVKVPMMKRLGMFNIQHSKKLSSWVLLMKYLGNATAIFFLPDEGKLQHLENELTHDIITKFLENEDRRSASLHLPKLSITGTYDLKSVLGQLGITKVFSNGADLSGVTEEAPLKLSKAVHKAVLTIDEKGTEAAGAMFLEAINMTIPPEVKFNKPFVFLMIDQNTKSPLFMGKVVNPTQK

SEQ ID NO: 277 - protein, 394 aa, Artificial Sequence
  alpha 1 anti-trypsin
EDPQGDAAQKTDTSHHDQDHPTFNKITPNLAEFAFSLYRQLAHQSNSTNIFFSPVSIATAFAMLSLGTKADTHDEILEGLNFNLTEIPEAQIHEGFQELLRTLNQPDSQLQLTTGNGLFLSEGLKLVDKFLEDVKKLYHSEAFTVNFGDTEEAKKQINDYVEKGTQGKIVDLVKELDRDTVFALVNYIFFKGKWERPFEVKDTEEEDFHVDQVTTVKVPMMKRLGMFNIQHCKKLSSWVLLMKYLGNATAIFFLPDEGKLQHLENELTHDIITKFLENEDRRSASLHLPKLSITGTYDLKSVLGQLGITKVFSNGADLSGVTEEAPLKLSKAVHKAVLTIDEKGTEAAGAMFLEAIPMSIPPEVKFNKPFVFLMIDQNTKSPLFMGKVVNPTQK

What is claimed:

1. A method for treating a subject having cancer with combination therapy comprising a soluble hyaluronidase that is a polymer-conjugated soluble hyaluronidase or is a liposome comprising a soluble hyaluronidase, the method comprising:
a) measuring the amount of expression or level of a first biomarker associated with Type III collagen degradation in a sample from the subject;
b) measuring the amount of expression or level of a second biomarker associated with Type III collagen formation in a sample from the subject;
c) determining the ratio amount of expression or level of the first biomarker/second biomarker;
d) selecting a subject for treatment for whom the ratio is indicative of benefit from administration of the combination therapy with a soluble hyaluronidase that is provided as a polymer-conjugated soluble hyaluronidase or as a liposome comprising a soluble hyaluronidase, wherein benefit is one or more of increased progression-free survival (PFS), objective/overall response rate, and/or overall survival (OS) when treated with the combination therapy compared to treatment with the same therapy, but without the soluble hyaluronidase; and
e) administering the combination therapy that comprises the soluble hyaluronidase to the selected subject, wherein the soluble hyaluronidase is a polymer-conjugated soluble hyaluronidase or is a liposome comprising a soluble hyaluronidase.

2. The method of claim 1, wherein the ratio of the amount of expression or level of the first biomarker/second biomarker is ≥0.3, ≥0.35, ≥0.38, ≥0.4, ≥0.45, ≥0.5, ≥0.54, ≥0.7, ≥0.75, ≥0.8 or ≥0.85 that is indicative of benefit from combination therapy comprising a soluble hyaluronidase.

3. The method of claim 1, wherein:
the biomarker associated with Type III collagen degradation is designated C3M;
C3M is a matrix metalloproteinase (MMP) degradation product of Type III collagen; and
the degradation product comprises a neo-epitope.

4. The method of claim 3, wherein C3M comprises residues corresponding to 610-619 of human Type III collagen (SEQ ID NO:227) or consists of residues corresponding to 610-619 of human Type III collagen (SEQ ID NO:227).

5. The method of claim 3, wherein the neo-epitope of C3M comprises the sequence KNGETGPQGP (SEQ ID NO:226) or consists of the sequence KNGETGPQGP (SEQ ID NO:226).

6. The method of claim 1, wherein the biomarker associated with Type III collagen formation is designated Pro-C3, wherein Pro-C3 is an N-terminal propeptide of Type III collagen (PIIINP) that comprises a neo-epitope.

7. The method of claim 6, wherein Pro-C3:
comprises the sequence CPTGPQNYSP (SEQ ID NO:216) formed by the N-protease cleavage of human Type III collagen (SEQ ID NO:227) from intact procollagen Type III at the Pro-Gln bond between amino acids P153-Q154 in human Type III collagen; or
comprises the sequence PTGPQNYSP (SEQ ID NO:229) and contains the neo-epitope; or
consists of the sequence PTGPQNYSP (SEQ ID NO:229).

8. The method of claim 1, wherein the first biomarker and the second biomarker are each detected by binding to a detectable moiety.

9. The method of claim 1, wherein:
the first biomarker and the second biomarker are each detected by an immunoassay comprising an antibody; and
the antibody in each assay specifically binds the fragment of the biomarker comprising the neo-epitope but not to the full-length or longer fragment that does not comprise the neo-epitope.

10. The method of claim 9, wherein each antibody is a monoclonal antibody, or an antigen-binding fragment of an antibody.

11. The method of claim 10, wherein the antibody that binds to Pro-C3 is designated NB61N-62.

12. The method of claim 10, wherein the antibody that binds to C3M is designated CO3-610C.

13. The method of claim 1, wherein the ratio is determined by:
measuring the amount of biomarker C3M, or level thereof in the sample, by detecting binding between an antibody and peptide fragments in the body fluid sample, wherein the antibody specifically binds to a neo-epitope amino acid sequence comprising KNGETGPQGP (SEQ ID NO:226);
measuring the amount of biomarker Pro-C3, or level thereof in the sample, by detecting binding between an antibody and peptide fragments in the body fluid sample, wherein the antibody specifically binds to a neo-epitope amino acid sequence comprising CPTGPQNYSP (SEQ ID NO:216); and
determining the ratio of the amounts of biomarker C3M and Pro-C3.

14. The method of claim 1, wherein:
the combination therapy comprises administration of a polymer-conjugated soluble hyaluronidase and a tumor-targeted taxane;
the first biomarker associated with Type III collagen degradation is C3M;
the second biomarker associated with Type III collagen formation is Pro-C3; and
the ratio is at least ≥0.3, ≥0.35, ≥0.4, ≥0.45, ≥0.5, or is at least 0.5 or 0.544.

15. The method of claim 1, wherein:
the combination therapy comprises administration of a the soluble hyaluronidase and a tumor-targeted taxane; and
the tumor-targeted taxane is nab-paclitaxel or nab-docetaxel.

16. The method of claim 1, wherein the combination therapy comprises administration of a tumor-targeted taxane.

17. The method of claim 16, wherein the tumor-targeted taxane is nab-paclitaxel or nab-docetaxel.

18. The method of claim 1, wherein the combination therapy comprises administration of a tumor-targeted taxane and a nucleoside analog.

19. The method of claim 18, wherein the tumor-targeted taxane is nab-paclitaxel or nab-docetaxel, and the nucleoside analog is gemcitabine.

20. The method of claim 1, wherein the sample is a body fluid.

21. The method of claim 1, wherein the sample is blood, urine, plasma, serum, cerebrospinal fluid, saliva, synovial fluid, peritoneal fluid, pericardial fluid, pleural fluid, amniotic fluid, vitreous humor, or aqueous humor.

22. The method of claim 21, wherein the sample is blood, serum, or plasma.

23. The method of claim 1, wherein the cancer comprises a solid tumor.

24. The method of claim 1, wherein the cancer is selected from among any one or more of ovarian cancer, in situ carcinoma (ISC), squamous cell carcinoma (SCC), prostate cancer, pancreatic cancer, small cell lung cancer, non-small cell lung cancer, mesothelioma, breast cancer, brain cancer, head and neck cancer, cervical cancer, colon cancer, uterine cancer, testicular cancer, bladder cancer, stomach cancer, hepatoma, melanoma, glioma, retinoblastoma, myeloma, lymphoma, and leukemia.

25. The method of claim 1, wherein the cancer is pancreatic cancer.

26. The method of claim 25, wherein the cancer is pancreatic ductal adenocarcinoma (PDAC) or metastatic pancreatic ductal adenocarcinoma (PDAC).

27. The method of claim 1, wherein the soluble hyaluronidase is a polymer-conjugated soluble hyaluronidase.

28. The method of claim 27, wherein the polymer is a sialation or PEGylation moiety, dextran, or a polypeptide that increases serum half-life and/or increases resistance to an endogenous protease.

29. The method of claim 27, wherein the polymer-conjugated soluble hyaluronidase is linked, directly or indirectly via a linker, to alpha-1 antitrypsin, a variant thereof, or portion of the alpha-1 antitrypsin or variant, whereby the fusion protein of the polymer-conjugated soluble hyaluronidase to alpha-1 antitrypsin has increased serum half-life.

30. The method of claim 27, wherein the polymer-conjugated soluble hyaluronidase is modified by PEGylation, sialation, albumination, glycosylation, farnesylation, carboxylation, hydroxylation, or phosphorylation.

31. The method of claim 30, wherein the polymer is PEG, and the soluble hyaluronidase has about or at 1, or 2-6 or 3-5 PEG moieties/hyaluronidase molecule on the average.

32. The method of claim 27, wherein the soluble hyaluronidase is a soluble form of PH20.

33. The method of claim 27, wherein the soluble hyaluronidase is selected from among:
a) a polypeptide that is encoded by a nucleic acid molecule encoding a C-terminally truncated polypeptide of the polypeptide set forth in SEQ ID NO:1, where the C-terminal amino acid residue is selected from among 467 to 495 of SEQ ID NO:1 or 474 to 483 of SEQ ID NO:1;
b) a polypeptide that has at least about 91% amino acid sequence identity with a sequence of amino acids set forth in a), whereby the soluble hyaluronidase is soluble, N-glycosylated and neutral active;
c) a polypeptide that has at least 98% sequence identity with residues 36-483 of SEQ ID NO:1;
d) a polypeptide has the sequence of amino acids set forth as amino acids 36-467, 36-468, 36-469, 36-470, 36-471, 36-472, 36-473, 36-474, 36-475, 36-476, 36-477, 36-478, 36-479, 36-480, 36-481, 36-482, or 36-483 of SEQ ID NO:1, or has at least about 91% amino acid sequence identity with a sequence of amino acids set forth as amino acids 36-467, 36-468, 36-469, 36-470, 36-471, 36-472, 36-473, 36-474, 36-475, 36-476, 36-477, 36-478, 36-479, 36-480, 36-481, 36-482, or 36-483 of SEQ ID NO:1; and
e) a polypeptide selected from among polypeptides containing a sequence of amino acids set forth in any of SEQ ID NOS: 4-9 and 46-48, and variants thereof that exhibit at least 91% sequence identity to any of SEQ ID NOS: 4-9 and 46-48.

34. The method of claim 1, wherein the polymer conjugated to the soluble hyaluronidase comprises a PEGylation moiety (PEG).

35. The method of claim 1, wherein the soluble hyaluronidase is a PEGylated soluble human PH20 hyaluronidase that has an average of 1, 2-5, 3-5 or 3-6 PEG moieties per PH20 hyaluronidase molecule.

36. The method of claim 1, wherein the combination therapy comprises the hyaluronidase and an anti-cancer agent selected from among a platinum compound, fluoropyrimidine 5-fluorouracil, 5-fluoro-2′-deoxycytidine, cytarabine, gemcitabine, troxacitabine, decitabine, Azacytidine, pseudoisocytidine, Zebularine, Ancitabine, Fazarabine, 6-azacytidine, capecitabine, N4-octadecyl-cytarabine, elaidic acid, cytarabine, fludarabine, cladribine, clofarabine, nelarabine, forodesine, and pentostatin, or derivatives thereof.

37. The method of claim 1, wherein the combination therapy comprises the hyaluronidase, a nucleoside analog, and a tumor-targeted taxane.

38. A combination, comprising:
a) a polymer-conjugated soluble hyaluronidase or a liposome comprising a soluble hyaluronidase;
b) an anti-cancer agent;
c) a first agent that specifically binds to a first biomarker associated with Type III collagen degradation in a sample from a subject; and
d) a second agent that specifically binds to a second biomarker associated with Type III collagen formation in a sample from a subject.

39. The combination of claim 38, wherein the anti-cancer agent is a tumor-targeted taxane.

40. The combination of claim 39, wherein the tumor-targeted taxane is nab-paclitaxel or nab-docetaxel.

41. The combination of claim 38, further comprising:
e) a nucleoside analog.

42. The combination of claim 41, wherein the nucleoside analog is selected from among fluoropyrimidine 5-fluorouracil, 5-fluoro-2′-deoxycytidine, cytarabine, gemcitabine, troxacitabine, decitabine, Azacytidine, pseudoisocytidine, Zebularine, Ancitabine, Fazarabine, 6-azacytidine, capecitabine, N4-octadecyl-cytarabine, elaidic acid, cytarabine, fludarabine, cladribine, clofarabine, nelarabine, forodesine, and pentostatin, and derivatives thereof.

43. The combination of claim 42, wherein the nucleoside analog is gemcitabine.

44. The combination of claim 38, wherein:
the biomarker associated with Type III collagen formation is Pro-C3, wherein Pro-C3 is an N-terminal propeptide of Type III collagen (PIIINP) that comprises the neo-epitope; and
the biomarker associated with Type III collagen degradation is designated C3M, wherein C3M is the matrix metalloproteinase (MMP) degradation product of Type III collagen that comprises a neo-epitope.

45. The combination of claim 44, wherein:
C3M comprises residues corresponding to 610-619 of human Type III collagen (SEQ ID NO:227) or C3M consists of residues corresponding to 610-619 of human Type III collagen (SEQ ID NO:227); and
Pro-C3 comprises the sequence PTGPQNYSP (SEQ ID NO:229) and contains the neo-epitope, or Pro-C3 consists of the sequence PTGPQNYSP (SEQ ID NO:229).

46. The combination of claim 38, wherein each agent that specifically binds to each biomarker is an antibody or antigen-binding fragment thereof.

47. The combination of claim 38, wherein:
the first agent that specifically binds to the biomarker associated with Type III collagen degradation is an antibody or antigen-binding fragment that binds to C3M and is designated CO3-610C; and/or
the second agent that specifically binds to the second biomarker associated with Type III collagen formation is an antibody or antigen-binding fragment that binds to Pro-C3 and is designated NB61N-62.

48. The combination of claim 38, wherein:
the hyaluronidase is a polymer-conjugated soluble hyaluronidase;
the tumor-targeted taxane is an albuminated taxane;
the first agent that binds to the biomarker associated with Type III collagen degradation is an antibody raised against the neo-epitope in the biomarker C3M; and
the second agent that binds to the biomarker associated with Type III collagen formation is an antibody raised against the neo-epitope in the biomarker PRO-C3.

49. The combination of claim 38, wherein the soluble hyaluronidase is selected from among:
a) a polypeptide that is encoded by a nucleic acid molecule encoding a C-terminally truncated polypeptide of the polypeptide set forth in SEQ ID NO:1, where the C-terminal amino acid residue is selected from among 467 to 495 of SEQ ID NO:1 or 474 to 483 of SEQ ID NO:1;
b) a polypeptide that has at least about 91% amino acid sequence identity with a sequence of amino acids set forth in a), whereby the soluble hyaluronidase is soluble, N-glycosylated and neutral active;
c) a polypeptide that has at least 98% sequence identity with residues 36-483 of SEQ ID NO:1;
d) a polypeptide has the sequence of amino acids set forth as amino acids 36-467, 36-468, 36-469, 36-470, 36-471, 36-472, 36-473, 36-474, 36-475, 36-476, 36-477, 36-478, 36-479, 36-480, 36-481, 36-482, or 36-483 of SEQ ID NO:1, or has at least about 91% amino acid sequence identity with a sequence of amino acids set forth as amino acids 36-467, 36-468, 36-469, 36-470, 36-471, 36-472, 36-473, 36-474, 36-475, 36-476, 36-477, 36-478, 36-479, 36-480, 36-481, 36-482, or 36-483 of SEQ ID NO:1; and
e) a polypeptide selected from among polypeptides containing a sequence of amino acids set forth in any of SEQ ID NOS: 4-9 and 46-48, and variants thereof that exhibit at least 91% sequence identity to any of SEQ ID NOS: 4-9 and 46-48.

50. The combination of claim 38, wherein the soluble hyaluronidase is a polymer-conjugated soluble hyaluronidase.

51. The combination of claim 50, wherein the polymer is a sialation or PEGylation moiety, or a polypeptide that increases the serum half-life of the hyaluronidase or increases resistance to an endogenous protease.

52. The combination of claim 50, wherein the polymer conjugated to the soluble hyaluronidase comprises a PEGylation moiety (PEG).

53. The combination of claim 51, wherein the soluble hyaluronidase is a PEGylated soluble human PH20 hyaluronidase that contains on the average 1, 2-5, 3-5 or 3-6 PEG moieties per molecule of hyaluronidase.

54. The method of claim 1, wherein:
the combination therapy comprises administration of a polymer-conjugated soluble hyaluronidase and chemotherapeutic agent;
the first biomarker associated with Type III collagen degradation is C3M;
the second biomarker associated with Type III collagen formation is Pro-C3; and
the ratio is at least ≥0.3, ≥0.35, ≥0.4, ≥0.45, ≥0.5, or is at least 0.5 or 0.544.

55. The method of claim 54, wherein the chemotherapeutic agent is a nucleoside analog.
